(19) United States
(12) Patent Application Publication
(10) Pub. No.: US 2023/0108584 A1
(43) Pub. Date: Apr. 6, 2023

(54) METHODS FOR ACTIVATION AND EXPANSION OF TUMOR INFILTRATING LYMPHOCYTES

(71) Applicant: KSQ Therapeutics, Inc,, Lexington, MA (US)

(72) Inventors: Micah Benson, Lexington, MA (US); Noah Jacob Tubo, Lexington, MA (US); Nicholas John Colletti, Lexington, MA (US); Robert Andrew LaMothe, Lexington, MA (US); Gregory V. Kryukov, Lexington, MA (US); Michael R. Schlabach, Lexington, MA (US); Sean Philip Leary Arlauckas, Lexington, MA (US)

(73) Assignee: KSQ Therapeutics, Inc,, Lexington, MA (US)

(21) Appl. No.: 17/802,080

(22) PCT Filed: Feb. 26, 2021
(86) PCT No.: PCT/US2021/019861

§ 371 Date: Aug. 24, 2022

Related U.S. Application Data
(60) Provisional application No. 63/144,853, filed on Feb. 2, 2021.
(60) Provisional application No. 63/074,841, filed on Sep. 4, 2020.
(60) Provisional application No. 62/983,416, filed on Feb. 28, 2020.

(51) Int. Cl. C12N 5/0783; A61K 38/18; A61K 38/19; A61K 38/20

(52) U.S. Cl. CPC C12N 5/0636; A61K 38/18; A61K 38/19; A61K 38/20; A61K 35/17

(57) ABSTRACT

Methods for activating and expanding TILs using unconventional cytokines are provided. These methods include techniques for activating and expanding TILs using streamlined approaches, including one-step approaches, approaches using agonists for stimulation, approaches more suitable for clinical manufacturing, and approaches without the requirement of feeder cells, are provided. Compositions of expanded populations of TILs are also provided, in addition to populations of expanded TILs enriched in central memory T cell phenotype.

### RELATED APPLICATIONS

[0001] This application claims the benefit under 35 U.S.C. § 119(e) of U.S. provisional application No. 62/983,416, filed Feb. 28, 2020, U.S. provisional application No. 63/074,841, filed Sep. 4, 2020, and U.S. provisional application No. 63/144,853, filed Feb. 2, 2021, each of which is incorporated by reference herein in its entirety.

### FIELD OF THE INVENTION

[0002] This disclosure relates to methods and compositions for activation and/or expansion of lymphocyte populations, e.g., tumor infiltrating lymphocytes (TILs).

### BACKGROUND

[0003] Tumor-infiltrating lymphocytes are white blood cells, including T cells and B cells, that have left the bloodstream and migrated towards a tumor. The presence of lymphocytes in tumors is often associated with better clinical outcomes, and indeed, TILs have been implicated in killing tumor cells. TILs are routinely used as an adoptive cell transfer therapy to treat certain types of cancer. The adoptive transfer of TILs is a powerful approach to the treatment of bulky, refractory cancers, for example, especially in patients with poor prognoses. In adoptive transfer therapy, TILs are expanded ex vivo from surgically resected tumors that have been cut into small fragments or from single cell suspensions isolated from the tumor fragments. The common process for TIL expansion requires that multiple individual cultures are established, grown separately, and assayed for specific tumor recognition. TILs are expanded over the course of a few weeks with a high dose of IL-2. Selected TIL lines that present the best tumor reactivity are then further expanded in a “rapid expansion protocol” (REP), which uses anti-CD3 activation for a typical period of two weeks. The final post-REP TIL population is infused back into the patient. Although widely used, these lengthy TIL expansion protocols are not reliable for expanding all TIL populations.

### SUMMARY

[0004] Provided herein, in some aspects, are TIL activation and/or expansion methods that not only shorten the period of time for expanding TIL populations by, for example, implementing a single-step rather than a multi-step culture process, but are also useful for expanding diverse populations of TILs. The methods described herein also offer a clinical manufacturing advantage by proving an alternative to feeder cells, in some embodiments.

[0005] Surprisingly, the streamlined methods provided herein, in some embodiments, offer a 30-50% increase in fold TIL (e.g., edited TIL) expansion over current TIL expansion protocols, while also supporting proliferation of effector T cells and enrichment of a central memory T cell phenotype, even in the absence of IL-2. The TILs produced by the methods of the present disclosure also express high levels of CD25, a receptor for IL-2, suggesting that the TILs are highly sensitive to endogenous IL-2 survival signals in patients. Experimental data described herein also show, unexpectedly, that the advantages of the methods of the present disclosure apply to both unmodified and modified (e.g., CRISPR/Cas gene or multi-gene edited) TIL populations.

[0006] The streamlined methods provided herein produce highly enriched, diverse populations of TILs and thus potentially more effective adoptive TIL transfer therapies.

[0007] Some aspects of the present disclosure provide a method of producing an expanded population of TILs, the method comprising culturing the disaggregated tumor sample in a culture medium comprising (a) feeder cells or an agonist of a T cell costimulatory molecule, (b) a T cell receptor (TCR) agonist, and (c) interleukin (IL)-15, thereby producing an expanded population of TILs.

[0008] In some embodiments, the culture medium comprises IL-15 at a concentration of greater than 100 ng/ml. In some embodiments, the culture medium comprises IL-15 at a concentration of less than 1000 ng/ml. In some embodiments, the culture medium comprises IL-15 at a concentration of greater than 100 ng/ml and less than 1000 ng/ml.

[0009] In some embodiments, the culture medium does not comprise IL-2. In some embodiments, the culture medium does not comprise IL-21. In some embodiments, the culture medium does not comprise IL-2 or IL-21.

[0010] In some embodiments, the culture medium further comprises IL-7, for example, at a concentration of 10 U/ml to 7,000 U/ml.

[0011] In some embodiments, the TCR agonist is selected from a CD3 agonist, OKT3, and UCHT1. In some embodiments, the TCR agonist is a CD3 agonist. In some embodiments, the TCR agonist is OKT3. In some embodiments, the TCR agonist is UCHT1.

[0012] In some embodiments, the CD3 agonist is an anti-CD3 antibody. For example, the anti-CD3 antibody may be a humanized anti-CD3 antibody. In some embodiments, the CD3 agonist is a soluble monospecific complex comprising two anti-CD3 antibodies linked together.

[0013] In some embodiments, the agonist of the T cell costimulatory molecule is selected from: a CD28 agonist, a CD137 agonist, a CD2 agonist, and combinations thereof. In some embodiments, the agonist of the T cell costimulatory molecule is a CD28 agonist. In some embodiments, the agonist of the T cell costimulatory molecule is a CD137 agonist. In some embodiments, the agonist of the T cell costimulatory molecule is a CD2 agonist. In some embodiments, the agonist of the T cell costimulatory molecule is a CD28 agonist and a CD137 agonist. In some embodiments, the agonist of the T cell costimulatory molecule is a CD28 agonist and a CD2 agonist. In some embodiments, the agonist of the T cell costimulatory molecule is a CD137 agonist and a CD2 agonist.

[0014] In some embodiments, the CD28 agonist comprises a soluble monospecific complex comprising two anti-CD28 antibodies linked together.

[0015] In some embodiments, the CD2 agonist comprises a soluble monospecific complex comprising two anti-CD2 antibodies linked together.

[0016] In some embodiments, the TCR agonist is linked to a nanomatrix comprising a colloidal suspension of matrices of polymer chains, wherein each matrix is 1 to 500 nm in length in its largest dimension. In some embodiments, the T cell costimulatory molecule is linked to a nanomatrix comprising a colloidal suspension of matrices of polymer chains, wherein each matrix is 1 to 500 nm in length in its largest dimension.

[0017] In some embodiments, the disaggregated tumor sample comprises tumor fragments, for example, generated by a dissection method, that are 0.5 to 4 mm³ in size. In some embodiments, the disaggregated tumor sample comprises tumor fragments, for example, generated by a mechanical method, that are 25 to 30 mm³ in size. In some embodiments, the tumor fragments comprise digested tumor fragments.

[0018] In some embodiments, cells of the expanded TIL population are genetically modified. In some embodiments, cells of the expanded TIL population are epigenetically modified.

[0019] In some embodiments, a method of producing an expanded population of TILs comprises genetically modifying cells of the expanded TIL population using a gene-regulating system, for example, selected from a gene-regulating system comprising RNA interference (RNAi) molecules, transcription activator-like effector nucleases (TALENs), zinc finger nucleases (ZFNs), and RNA-guided nucleases. In some embodiments, the gene-regulating system comprises an RNAi molecule. In some embodiments, the gene-regulating system comprises a TALEN. In some embodiments, the gene-regulating system comprises a ZFN. In some embodiments, the gene-regulating system comprises an RNA-guided nuclease. In some embodiments, the gene-regulating system comprises a Cas enzyme, for example, a Cas9 enzyme, and a guide RNA.

[0020] In some embodiments, cells of the TIL population comprise a modification, for example, an insertion, deletion, indel, or substitution, at one or more gene(s) selected from: ANKRD11, BCL2L11, BCL3, BCOR, CALM2, CBLB, CHIC2, CTLA4, DHODH, E2F8, EGR2, FLI1, FOXP3, GATA3, GNAS, HAVCR2, IKZF1, IKZF2, IKZF3, LAG3, MAP4K, NFKBIA, NR4A3, NRP1, PBRM1, PCBP1, PDCD1, PELI1, PIK3CD, PPP2R2D, PTPN1, PTPN2, PTPN22, PTPN6, RBM39, RC3H1, SEMA7A, SERPINA3, SETD5, SH2B3, SH2D1A, SMAD2, SOCS1, TANK, TGFBR1, TGFBR2, TIGIT, TNFAIP3, TNIP1, TRAF6, UMPS, WDR6 and ZC3H12A. In some embodiments, the modification results in reduction or inhibition of expression of the one or more gene(s) and/or function of one or more protein(s) encoded by the one or more gene(s). In some embodiments, the cells of the TIL population comprises a modification, optionally an insertion, deletion, indel, or substitution, at the SOCS1 gene and the ZC3H12A gene.

[0021] In some embodiments, at least a portion of the culture medium is changed during the culturing. In some embodiments, at least a portion of the culture medium is supplemented with IL-15 during the culturing.

[0022] In some embodiments, the culturing occurs over a period of 9-25 days. In some embodiments, the culturing occurs over a period of 9-21 days. In some embodiments, the culturing occurs over a period of 9-14 days.

[0023] In some embodiments, at least 10% of the expanded population of TILs have a central memory T cell phenotype. In some embodiments, at least 15% of the expanded population of TILs have a central memory T cell phenotype.

[0024] Other aspects of the present disclosure provide a method of producing an expanded population of TILs, the method comprising: culturing a disaggregated tumor sample in a first medium comprising a T cell-stimulating cytokine to produce a population of TILs; and culturing cells of the population of TILs in a second medium comprising feeder cells or an agonist of a T cell costimulatory molecule, a TCR agonist, and IL-15, thereby producing an expanded population of TILs. In some embodiments, the method further comprises modifying cells of the population of TILs from the first medium using a gene-regulating system to produce a subpopulation of modified TILs, wherein the population of TILs cultured in the second medium includes the subpopulation of modified TILs. In some embodiments, the first medium does not comprise IL-2. In some embodiments, the second medium does not comprise IL-2. In some embodiments, neither the first medium nor the second medium comprises IL-2.

[0025] Yet other aspects of the present disclosure provide a method for expanding a population of TILs comprising: culturing the population of TILs in a culture medium comprising (a) IL-15 and (b) a nanomatrix comprising a colloidal suspension of matrices of polymer chains, wherein the matrices are attached to TCR agonists and agonists of a T cell costimulatory molecule, each matrix is 1 to 500 nm in length in its largest dimension, and optionally the method does not comprise the use of feeder cells during expansion of the population of TILs.

[0026] Still other aspects of the present disclosure provide a method for expanding a population of TILs comprising: culturing the population of TILs in a culture medium comprising (a) IL-15, (b) a first soluble monospecific complex comprising an anti-CD3 antibody or fragment thereof, (c) a second soluble monospecific complex comprising an anti-CD28 antibody or fragment thereof, and (d) a third soluble monospecific complex comprising an anti-CD2 antibody or fragment thereof, wherein each of the soluble monospecific complexes comprises two antibodies, or fragments thereof, linked together, and each antibody, or fragments thereof, of each of the soluble monospecific complexes specifically binds to the same antigen on the population of TILs.

[0027] Also provided herein, in some aspects, is a composition comprising an expanded population of TILs produced by the method of any one of the preceding paragraphs.

[0028] Some aspects provide a composition comprising a disaggregated tumor sample in a culture medium comprising (a) feeder cells, (b) a T cell receptor (TCR) agonist, and (c) interleukin (IL)-15, for example, at a concentration of greater than 100 ng/ml and less than 1000 ng/ml. Other aspects provide a composition comprising a disaggregated tumor sample in a culture medium comprising (a) an agonist of a T cell costimulatory molecule, (b) a T cell receptor (TCR) agonist, and (c) interleukin (IL)-15, for example, at a concentration of greater than 100 ng/ml and less than 1000 ng/ml. Yet other aspects provide a composition comprising TILs in a culture medium comprising (a) feeder cells, (b) a T cell receptor (TCR) agonist, and (c) interleukin (IL)-15, for example, at a concentration of greater than 100 ng/ml and less than 1000 ng/ml. Still other aspects provide a composition comprising TILs in a culture medium comprising (a) an agonist of a T cell costimulatory molecule, (b) a T cell receptor (TCR) agonist, and (c) interleukin (IL)-15, for example, at a concentration of greater than 100 ng/ml and less than 1000 ng/ml. In some embodiments, the composition does not comprise IL-2.

### BRIEF DESCRIPTION OF THE DRAWINGS

[0029] The foregoing and other features and advantages of the present invention will be more fully understood from the following detailed description of illustrative embodiments taken in conjunction with the accompanying drawings.

[0030] FIGS. 1A-1B present graphs showing fold expansion (FIG. 1A) and percent viabilities (FIG. 1B) of TILs harvested at day 14 of REP containing 6000 U/ml IL-2 (conventional process), 1000 ng/ml IL-15 (IL15 Process) or 10 ng/ml IL-7 and 300 ng/ml IL-15 (IL7/15 Process A), or 10 ng/ml IL7 and 1000 ng/ml IL15 (IL7/15 Process B).

[0031] FIGS. 2A-2B present graphs showing the percent of TIL that are CD8+ (FIG. 2A) and the percent of TIL that are CCR7+CD45RO+ (FIG. 2B) in TILs harvested at day 14 of REP containing 6000 U/ml IL-2 (conventional process), 1000 ng/ml IL-15 (IL15 Process) or 10 ng/ml IL-7 and 300 ng/ml IL-15 (IL7/15 Process A), or 10 ng/ml IL7 and 1000 ng/ml IL15 (IL7/15 Process B).

[0032] FIGS. 3A-3D present graphs showing the percentage of CD8+ TIL that express CD107a upon stimulation (FIG. 3A) as well as the percentage of CD107a+ CD8+ TIL that are additionally IFNγ+ IL-2+ (FIG. 3B), TNFα+ IL-2+ (FIG. 3C), or IFNγ+ TNFα+ (FIG. 3D), after a 14 day REP containing IL-2 (conventional process), 10 ng/ml IL-7 and 300 ng/ml IL-15 (IL7/15 Process A), or 10 ng/ml IL7 and 1000 ng/ml IL15 (IL7/15 Process B).

[0033] FIGS. 4A-4C present graphs showing the relative fold expansion of OR1A1 gene-edited TIL (FIG. 4A), SOCS1 gene-edited TIL (FIG. 4B), and SOCS1/PTPN2 dual gene-edited (FIG. 4C) TIL expanded in REPs that contain 1000 ng/ml IL-15 (IL15 Process), 10 ng/ml IL-7 and 300 ng/ml IL-15 (IL7/15 Process A), or 10 ng/ml IL-7 and 1000 ng/ml IL-15 (IL7/15 Process B) compared to the fold expansion of the respective gene-edited TIL grown in IL-2 (conventional process).

[0034] FIGS. 5A-5C present graphs showing the fold expansion of peripheral blood derived memory T cells after a 14 day expansion in the presence of irradiated PBMCs (at a 1 T cells to 100 irradiated PBMC ratio) additionally 30 ng/ml OKT3 (“PBMC REP (1:100)”), with irradiated K562 cells genetically modified to overexpress CD86 and a membrane bound anti-CD3 scFv (“CD86, anti-CD3 K562”), with irradiated K562 cells genetically modified to overexpress CD86, 41BBL, and a membrane bound anti-CD3 scFv (“41BBL, CD86, anti-CD3 K562”), or with irradiated non-genetically modified K562 cells (“unmodified K563).

[0035] FIG. 6 represents graphs T cell exhaustion scores in TILs that were OR1A1-edited and then cultured in IL-15 or IL-2

[0036] FIG. 7 represents graphs of cytotoxicity scores in TILs that were OR1A1-edited and then cultured in IL-15 or IL-2.

[0037] FIG. 8 represents graphs of expression of IFNγ in TILs that were OR1A1-edited and then cultured in IL-15 or IL-2.

[0038] FIG. 9 depicts a bar graph showing fold expansion for soluble tetramer and artificial antigen presenting cell (aAPC) at day 10 or 11.

[0039] FIG. 10 depicts a bar graph showing fold expansion for soluble tetramer and aAPC edits at day 18 or day 23.

[0040] FIG. 11 depicts a bar graph showing central memory phenotype at day 18 or day 23.

[0041] FIG. 12 depicts a table of editing frequencies at day 18 or 23.

[0042] FIG. 13 depicts a bar graph showing TIL tumor fragment extrapolated cell counts at day 14 or 20.

[0043] FIG. 14 depicts a bar graph showing central memory phenotype at day 14 or 20.

[0044] FIG. 15 depicts a table of editing frequencies at day 14.

[0045] FIG. 16 depicts tables of editing frequencies at day 14.

[0046] FIG. 17 depicts bar graphs showing viability of TILs from different donors prepared from tumor fragments and digests.

[0047] FIG. 18 depicts bar graphs showing cell numbers for TILs from different donors prepared from tumor fragments and digests.

[0048] FIG. 19 depicts a process layout for expanding TILs from tumor fragments using a soluble activator.

[0049] FIG. 20 depicts bar graphs showing total cell number (top) and viability (bottom) of TILs from different fragment donors and cultured in either IL-2 or IL-15 prior to electroporation phase.

[0050] FIG. 21 depicts bar graphs showing total cell number (top) and viability (bottom) of TILs from donor 4375 cultured in either IL2 or IL15 following electroporation. *Indicates absence of cytokine from sample.

[0051] FIG. 22 depicts tables of editing frequencies at day 17.

[0052] FIG. 23 depicts FACS gating strategy at day 17 for FIG. 24 to FIG. 26.

[0053] FIG. 24 depicts dot plots showing CD4/CD8 population (top left); CD45RO/CCR7 population gated on CD45/CD3 (top right); CD45RO/CCR7 population gated on CD45/CD3/CD4 (bottom left) and CD45RO/CCR7 population gated on CD45/CD3/CD8 (bottom right) at day 17.

[0054] FIG. 25 depicts half off-set histograms showing CD28 (top left), CD27 (Top middle) and KLRG1 expression (top right) gated on CD45/CD3; KLRG1 expression gated on CD45/CD3/CD4 (bottom left) and KLRG1 expression gated on CD45/CD3/CD8 (bottom right) at day 17. Mean fluorescence intensity is shown in CD28 and CD27 graphs while percent positive population is shown in KLRG1 graphs.

[0055] FIG. 26 depicts half off-set histograms showing ICOS (Inducible T-cell COStimulator) expression gated on CD45/CD3 (left), ICOS expression gated on CD45/CD3/CD4 (middle) and ICOS expression gated on CD45/CD3/CD8 (right) at day 17. Mean fluorescence intensity is shown in all the graphs.

### DETAILED DESCRIPTION

[0056] Improved methods for activating and expanding TILs using unconventional cytokines are provided. These methods include techniques for activating and expanding TILs using more streamlined approaches, including one-step approaches, approaches using agonists for stimulation, approaches more suitable for clinical manufacturing, and approaches without the requirement of feeder cells, are provided. Compositions of expanded populations of TILs are also provided, in addition to populations of expanded TILs enriched in central memory T cell phenotype.

[0057] In one aspect, the present disclosure provides methods of expanding a population of TILs that utilize non-traditional cytokines, such as IL-15 and/or IL-7. The provided methods of expanding a population of TILs comprise the steps of culturing a disaggregated tumor sample in a first medium comprising a T cell-stimulating cytokine to obtain a population of TILs; and culturing the population of TILs in a second medium comprising a T cell receptor (TCR) agonist; feeder cells; and greater than 100 ng/ml IL-15, wherein the second medium does not comprise IL-2, thereby expanding the population of TILs.

[0058] In another aspect, the present disclosure provides methods of expanding a population of TILs comprising the steps of culturing a disaggregated tumor sample in a first medium comprising a T cell-stimulating cytokine to obtain a population of TILs; modifying members of the population of TILs using a gene-regulating system to obtain a modified population of TILs; and culturing the modified population of TILs in a second medium comprising a TCR agonist; feeder cells; and IL-15, thereby expanding the population of TILs.

[0059] Generally, nomenclature used in connection with cell and tissue culture, molecular biology, immunology, microbiology, genetics, and protein and nucleic acid chemistry and hybridization described herein is well-known and commonly used in the art. The methods and techniques provided herein are generally performed according to conventional methods well known in the art and as described in various general and more specific references that are cited and discussed throughout the present specification unless otherwise indicated. Enzymatic reactions and purification techniques are performed according to manufacturer's specifications, as commonly accomplished in the art or as described herein. The nomenclature used in connection with, and the laboratory procedures and techniques of molecular and cell biology and biochemistry described herein are well-known and commonly used in the art.

[0060] Unless otherwise defined herein, scientific and technical terms used herein have the meanings that are commonly understood by those of ordinary skill in the art. In the event of any latent ambiguity, definitions provided herein take precedence over any dictionary or extrinsic definition. Unless otherwise required by context, singular terms shall include pluralities and plural terms shall include the singular. The use of “or” means “and/or” unless stated otherwise. The use of the term “including,” as well as other forms, such as “includes” and “included,” is not limiting.

[0061] As used herein, the terms “about” and “approximately” refer to a value being within 5% of a given value or range.

[0062] As used herein, the phrase “tumor infiltrating lymphocytes” or “TILs” refers to a population of lymphocytes that have left the bloodstream of a subject and migrated into a tumor. TILs include, but are not limited to, CD8⁺ cytotoxic T cells, CD4⁺ T cells including Th1 and Th17 CD4⁺ T cells, natural killer T cells, and natural killer (NK) cells. TILs include both primary and secondary TILs. “Primary TILs” are those that are obtained from patient tissue samples as outlined herein (sometimes referred to as “freshly harvested”), and “secondary TILs” are any TIL cell populations that have been expanded or proliferated as discussed herein, including, but not limited to bulk TILs and expanded TILs (“REP TILs” or “post-REP TILs”). In some embodiments, primary TILs include tumor reactive T cells that are obtained from peripheral blood of a patient. TIL cell populations can include genetically modified TILs. “TILs” also refers to a population of lymphocytes that have left the blood stream of a subject, have migrated into a tumor and then have departed to again enter the bloodstream.

[0063] As used herein, the phrase “population of cells” or “population of TILs” refers to a number of cells or TILs that share common traits. In general, populations generally range from 1×10⁶ to 1×10¹⁰ in number, with different TIL populations comprising different numbers. For example, initial growth of primary TILs in the presence of IL-2 can result in a population of bulk TILs of roughly 1×10⁷ cells. REP expansion is generally done to provide populations of 1.5×10⁹ to 1.5×10¹⁰ cells for infusion. In some embodiments, the population of cells is monoclonal. In other embodiments, the population of cells is polyclonal. In some embodiments, when the population of cells is polyclonal, the cells still share one or more common traits. A monoclonal T-cell population will result in the predominance of a single TCR-gene rearrangement pattern. In contrast, polyclonal T-cell populations have diverse TCR-gene rearrangement pattern, which can make them more effective in certain situations.

[0064] As used herein, the phrase “expanding a population of TILs” is synonymous with “proliferating a population of TILs” and refers to increasing the number of cells in a TIL population.

[0065] As used herein, the phrase “expansion process” refers to the process whereby the number of cells in a TIL population is increased. Processes where TILs are merely isolated or enriched without substantial increase in the number of TILs are not expansion processes.

[0066] As used herein, the term “agonist” refers to a chemical, a molecule, a macromolecule, a complex of molecules, or a complex of macromolecules that binds to a target, either on the surface of a cell or in soluble form. In certain embodiments, when an agonist binds to a target on the surface of a cell, the agonist activates the target to produce a biological response. Agonists include hormones, neurotransmitters, antibodies, and fragments of antibodies.

[0067] As used herein, the term “subject” refers to a human being who has a tumor into which a population of lymphocytes that have left the human being's bloodstream have migrated and transformed into TILs. In some embodiments, this human being may be a patient in need of immunotherapy involving an expanded population of the patient's own TILs. In other embodiments, this human being may be a patient in need of immunotherapy involving an expanded population of another patient's own TILs.

[0068] As used herein, the term “CD3” refers to the CD3 (cluster of differentiation 3) T cell co-receptor that helps to activate both the cytotoxic T cell (CD8+naïve T cells) and also T helper cells (CD4+naïve T cells). CD3 is a protein complex composed of six distinct polypeptide chains (2 CD3 zeta chains, 2 CD3 epsilon chains, 1 CD3e gamma chain, and 1 CD3 delta chain). These chains associate with the T-cell receptor (TCR) alpha and beta chains (or gamma and delta chains) to generate an activation signal in T lymphocytes. The TCR alpha and beta chains (or gamma and delta chains), and CD3 molecules together constitute the TCR complex. The human CD3E gene is identified by National Center for Biotechnology Information (NCBI) Gene ID 916. An exemplary nucleotide sequence for a human CD3E gene is the NCBI Reference Sequence: NG_007383.1. An exemplary amino acid sequence of a human CD3E polypeptide is provided as SEQ ID NO: 876.

TABLE 1
Sequences of human Cluster of Differentiation polypeptides and cytokines

| NCBI Reference | SEQ | |
|---|---|---|
| Sequence No. | ID NO | SEQUENCE |
| NG_007383.1 | 876 | MQSGTHWRVLGLCLLSVGVWGQDGNEEMGGITQTPYKVSISGTTVILTCPQYP |
| | | GSEILWQHNDKNIGGDEDDKNIGSDEDHLSLKEFSELEQSGYYVCYPRGSKPED |
| | | ANFYLYLRARVCENCMEMDVMSVATIVIVDICITGGLLLLVYYWSKNRKAKA |
| | | KPVTRGAGAGGRQRGQNKERPPPVPNPDYEPIRKGQRDLYSGLNQRRI |
| NG_029618.1 | 877 | MLRLLLALNLFPSIQVTGNKILVKQSPMLVAYDNAVNLSCKYSYNLFSREFRAS |
| | | LHKGLDSAVEVCVVYGNYSQQLQVYSKTGFNCDGKLGNESVTFYLQNLYVNQ |
| | | TDIYFCKIEVMYPPPYLDNEKSNGTIIHVKGKHLCPSPLFPGPSKPFWVLVVVGG |
| | | VLACYSLLVTVAFIIFWVRSKRSRLLHSDYMNMTPRRPGPTRKHYQPYAPPRDF |
| | | AAYRS |
| NG_050908.1 | 878 | MSFPCKFVASFLLIFNVSSKGAVSKEITNALETWGALGQDINLDIPSFQMSDDID |
| | | DIKWEKTSDKKKIAQFRKEKETFKEKDTYKLFKNGTLKIKHLKTDDQDIYKVSI |
| | | YDTKGKNVLEKIFDLKIQERVSKPKISWTCINTTLTCEVMNGTDPELNLYQDGK |
| | | HLKLSQRVITHKWTTSLSAKFKCTAGNKVSKESSVEPVSCPEKGLDIYLIIGICG |
| | | GGSLLMVFVALLVFYITKRKKQRSRRNDEELETRAHRVATEERGRKPHQIPAST |
| | | PQNPATSQHPPPPPGHRSQAPSHRPPPPGHRVQHQPQKRPPAPSGTQVHQQKGP |
| | | PLPRPRVQPKPPHGAAENSLSPSSN |
| NG_016779.1 | 879 | MYRMQLLSCIALSLALVTNSAPTSSSTKKTQLQLEHLLLDLQMILNGINNYKNP |
| | | KLTRMLTFKFYMPKKATELKHLQCLEEELKPLEEVLNLAQSKNFHLRPRDLISN |
| | | INVIVLELKGSETTFMCEYADETATIVEFLNRWITFCQSIISTLT |
| NP_001552.2 | 880 | MGNSCYNIVATLLLVLNFERTRSLQDPCSNCPAGTFCDNNRNQICSPCPPNSFSS |
| | | AGGQRTCDICRQCKGVFRTRKECSSTSNAECDCTPGFHCLGAGCSMCEQDCKQ |
| | | GQELTKKGCKDCCFGTFNDQKRGICRPWTNCSLDGKSVLVNGTKERDVVCGP |
| | | SPADLSPGASSVTPPAPAREPGHSPQIISFFLALTSTALLFLLFFLTLRFSVVKRGR |
| | | KKLLYIFKQPFMRPVQTTQEEDGCSCRFPEEEEGGCEL |
| NP_003802.1 | 881 | MEYASDASLDPEAPWPPAPRARACRVLPWALVAGLLLLLLLAAACAVFLACP |
| | | WAVSGARASPGSAASPRLREGPELSPDDPAGLLDLRQGMFAQLVAQNVLLIDG |
| | | PLSWYSDPGLAGVSLTGGLSYKEDTKELVVAKAGVYYVFFQLELRRVVAGEG |
| | | SGSVSLALHLQPLRSAAGAAALALTVDLPPASSEARNSAFGFQGRLLHLSAGQR |
| | | LGVHLHTEARARHAWQLTQGATVLGLFRVTPEIPAGLPSPRSE |
| CAA71044.1 | 882 | MDFQVQIFSFLLISASVIMSRANWVNVISDLKKIEDLIQSMHIDATLYTESDVHP |
| | | SCKVTAMKCFLLELQVISLESGDASIHDTVENLIILANNSLSSNGNVTESGCKEC |
| | | EELEEKNIKEFLQSFVHIVQMFINTS |
| AAH47698 | 883 | MFHVSFRYIFGLPPLILVLLPVASSDCDIEGKDGKQYESVLMVSIDQLLDSMKEI |
| | | GSNCLNNEFNFFKRHICDANKEGMFLFRAARKLRQFLKMNSTGDFDLHLLKVS |
| | | EGTTILLNCTGQVKGRKPAALGEAQPTKSLEENKSLKEQKKLNDLCFLKRLLQE |
| | | IKTCWNKILMGTKEH |
| BBA22643 | 884 | MRSSPGNMERIVICLMVIFLGTLVHKSSSQGQDRHMIRMRQLIDIVDQLKNYVN |
| | | DLVPEFLPAPEDVETNCEWSAFSCFQKAQLKSANTGNNERIINVSIKKLKRKPPS |
| | | TNAGRRQKHRLTCPSCDSYEKKPPKEFLERFKSLLQKMIHQHLSSRTHGSEDS |

[0069] In Table 1, the presumed leader sequences for proteins that have them are shown as underlined.

[0070] As used herein, the term “CD28” refers to cluster of differentiation 28, which is one of the proteins expressed on T cells that provides co-stimulatory signals required for T cell activation and survival. T cell stimulation through CD28 in addition to the T-cell receptor (TCR) can provide a potent signal for the production of various cytokines, such as interleukins. CD28 is the receptor for CD80 and CD86 proteins. When activated by Toll-like receptor ligands, CD80 expression is upregulated in antigen-presenting cells (APCs). The human CD28 gene is identified by NCBI Gene ID 940. An exemplary nucleotide sequence for a human CD28 gene is the NCBI Reference Sequence: NG_029618.1. An exemplary amino acid sequence of a human CD28 polypeptide is provided as SEQ ID NO: 877.

[0071] As used herein, the term “CD2” refers to cluster of differentiation 2, which is a cell adhesion molecule found on the surface of T cells and natural killer (NK) cells. CD2 interacts with other adhesion molecules and acts as a co-stimulatory molecule on T and NK cells. The human CD2 gene is identified by NCBI Gene ID 914. An exemplary nucleotide sequence for a human CD2 gene is the NCBI Reference Sequence: NG_050908.1. An exemplary amino acid sequence of a human CD2 polypeptide is provided as SEQ ID NO: 878.

[0072] As used herein, the term “4-1BB” refers to CD137, which is a T cell costimulator. An exemplary nucleotide sequence for a human 4-1BB gene is the NCBI Reference Sequence: NG_052834.1. An exemplary amino acid sequence of a human 4-1BB is the NCBI Reference Sequence: NP_001552.2. An exemplary amino acid sequence of a human 4-1BB polypeptide is provided as SEQ ID NO: 880.

[0073] As used herein, the term “4-1BB ligand” refers to a type 2 transmembrane glycoprotein that is expressed on activated T-lymphocytes and binds 4-1BB. An exemplary nucleotide sequence for a human 4-1BB gene is the NCBI Reference Sequence: NC_000019.10 (6,531,026-6,535,924). An exemplary amino acid sequence of a human 4-1BB is the NCBI Reference Sequence: AAA53134.1. An exemplary amino acid sequence of a human 4-1BB ligand polypeptide is provided as SEQ ID NO: 881.

[0074] As used herein, the term “cytokine” refers to a broad category of small proteins (about 5-20 kDa in size) that are important in cell signaling. Cytokines are peptides and cannot cross the lipid bilayer of cells to enter the cytoplasm. Cytokines have been shown to be involved in autocrine signaling, paracrine signaling, and endocrine signaling as immunomodulating agents. Cytokines include chemokines, interferons, interleukins, lymphokines, and tumor necrosis factors, but generally not hormones or growth factors, although there is some overlap in terminology. Cytokines are produced by a broad range of cells, including immune cells like macrophages, B lymphocytes, T lymphocytes, and mast cells, as well as endothelial cells, fibroblasts, and various stromal cells. Cytokines generally act through binding to cell-surface receptors and are especially important in the immune response, since they are involved in regulating the maturation, growth, and responsiveness of particular cell populations.

[0075] As used herein, the phrase “T cell-stimulating cytokine” refers to a cytokine that stimulates and/or activates T cell lymphocytes. In some embodiments, the T-cell stimulating cytokine is IL-2, IL-7, IL-15 or IL-21. In certain embodiments, T cell-stimulating cytokines are produced in a cell from a viral vector.

[0076] As used herein, the term “IL-2” (also referred to herein as “IL2”) refers to the cytokine and T cell growth factor known as interleukin-2, and includes all forms of IL-2, including human and mammalian forms, forms with conservative amino acid substitutions, glycoforms, biosimilars, and variants thereof. IL-2 is described, e.g., in Nelson, J. Immunol. 2004, 172, 3983-88 and Malek, Annu. Rev. Immunol. 2008, 26, 453-79, the disclosures of which are incorporated herein by reference in their entireties. The term IL-2 encompasses human, recombinant forms of IL-2, such as aldesleukin (PROLEUKIN, available commercially from multiple suppliers in 22 million IU per single use vials), as well as the form of recombinant IL-2 commercially supplied by CellGenix, Inc., Portsmouth, N.H., USA (CELLGRO GMP) or ProSpec-Tany TechnoGene Ltd., East Brunswick, N.J., USA (Cat. No. CYT-209-b) and other commercial equivalents from other vendors. Aldesleukin (des-alanyl-1, serine-125 human IL-2) is a nonglycosylated human recombinant form of IL-2 with a molecular weight of approximately 15 kDa. The term IL-2 also encompasses pegylated forms of IL-2, including the pegylated IL-2 prodrug NKTR-214, available from Nektar Therapeutics, South San Francisco, Calif., USA. NKTR-214 and pegylated IL-2 suitable for use in the invention is described in U.S. Patent Application Publication No. US 2014/0328791 A1 and International Patent Application Publication No. WO 2012/065086 A1, the disclosures of which are incorporated herein by reference in their entireties. Alternative forms of conjugated IL-2 suitable for use in the invention are described in U.S. Pat. Nos. 4,766,106, 5,206,344, 5,089,261 and 4,902,502, the disclosures of which are incorporated herein by reference in their entireties. Formulations of IL-2 suitable for use in the invention are described in U.S. Pat. No. 6,706,289, the disclosure of which is incorporated herein by reference in its entirety. The human IL2 gene is identified by NCBI Gene ID 3558. An exemplary nucleotide sequence for a human IL2 gene is the NCBI Reference Sequence: NG_016779.1. An exemplary amino acid sequence of a human IL-2 polypeptide is provided as SEQ ID NO: 879.

[0077] Interleukin-2 (IL-2) is an interleukin, a type of cytokine signaling molecule in the immune system. It is a 15.5-16 kDa protein that regulates the activities of white blood cells (leukocytes, often lymphocytes) that are responsible for immunity. IL-2 is part of the body's natural response to microbial infection. IL-2 mediates its effects by binding to IL-2 receptors, which are expressed by lymphocytes. The major sources of IL-2 are activated CD4+ T cells and activated CD8+ T cells.

[0078] IL-2 has essential roles in key functions of the immune system, tolerance and immunity, primarily via its direct effects on T cells. In the thymus, where T cells mature, it prevents autoimmune diseases by promoting the differentiation of certain immature T cells into regulatory T cells, which suppress other T cells that are otherwise primed to attack normal healthy cells in the body. IL-2 enhances activation-induced cell death (AICD). IL-2 also promotes the differentiation of T cells into effector T cells and into memory T cells when the initial T cell is also stimulated by an antigen, thus helping the body fight off infections. Together with other polarizing cytokines, IL-2 stimulates naive CD4+ T cell differentiation into Th1 and Th2 lymphocytes while it impedes differentiation into Th17 and follicular Th lymphocytes. Its expression and secretion are tightly regulated and functions as part of both transient positive and negative feedback loops in mounting and dampening immune responses. Through its role in the development of T cell immunologic memory, which depends upon the expansion of the number and function of antigen-selected T cell clones, it plays a role in enduring cell-mediated immunity.

[0079] The methods for expanding populations of TILs as provided in the present disclosure utilize IL-15. IL-15 (also referred to herein as “IL15”) refers to the cytokine and T cell growth factor known as interleukin-15, and as utilized in the present invention, includes all forms of IL-15, including human and other mammalian forms, forms with conservative amino acid substitutions, glycoforms, biosimilars, and variants thereof. IL-15 is described, e.g., in Steel J C, Waldmann T A, Morris J C (January 2012) “Interleukin-15 biology and its therapeutic implications in cancer,” Trends in Pharmacological Sciences, 33 (1): 35-41 and Waldmann T A, Tagaya Y (1999) “The multifaceted regulation of interleukin-15 expression and the role of this cytokine in NK cell differentiation and host response to intracellular pathogens,” Annual Review of Immunology, 17: 19-49, the disclosures of which are incorporated herein by reference in their entireties. The term IL-15 also encompasses recombinant forms of IL-15. As used herein, the term IL-15 also encompasses pegylated forms of IL-15. The human IL15 gene is identified by NCBI Gene ID 3600. An example nucleotide sequence for a human IL15 gene is the NCBI Reference Sequence: NG_029605.2. An exemplary amino acid sequence of a human IL-15 polypeptide is provided as SEQ ID NO: 882.

[0080] IL-15 can be utilized in the methods provided at a final concentration of greater than 0.5 ng/ml. In some embodiments, the final concentration of IL-15 utilized is more than 1 ng/ml. In some embodiments, the final concentration of IL-15 utilized is more than 2 ng/ml. In some embodiments, the final concentration of IL-15 utilized is more than 10 ng/ml. In some embodiments, the final concentration of IL-15 utilized is more than 50 ng/ml. In some embodiments, the final concentration of IL-15 utilized is more than 75 ng/ml. In some embodiments, the final concentration of IL-15 utilized is more than 100 ng/ml. In some embodiments, the final concentration of IL-15 utilized is more than 150 ng/ml. In some embodiments, the final concentration of IL-15 utilized is more than 200 ng/ml. In some embodiments, the final concentration of IL-15 utilized is less than 10,000 ng/ml, optionally less than 9000, 8000, 7000, 6000, 5000, 4000, 3000, 2000, or 1000 ng/ml. In some embodiments, the final concentration of IL-15 utilized is about 300 ng/ml. In some embodiments, the final concentration of IL-15 utilized is about 1000 ng/ml. In further embodiments, the final concentration of IL-15 utilized is greater than 1000 ng/ml. In some embodiments, the final concentration of the IL-15 in the second medium is greater than 100 ng/ml. In further embodiments, the final concentration of IL-15 in the second medium is greater than 100 ng/ml to about 1000 ng/ml. In a specific embodiment, the final concentration of IL-15 in the second medium is about 300 ng/ml.

[0081] IL-15 can be utilized in the methods provided at a final concentration of greater than 1 U/ml. In some embodiments, the final concentration of IL-15 utilized is more than 2 U/ml. In some embodiments, the final concentration of IL-15 utilized is more than 4 U/ml. In some embodiments, the final concentration of IL-15 utilized is more than 20 U/ml. In some embodiments, the final concentration of IL-15 utilized is more than 200 U/ml. In some embodiments, the final concentration of IL-15 utilized is less than 20,000 U/ml, optionally less than 18,000, 16,000, 14,000, 12,000, 10,000, 8000, 6000, 4000, or 2000 ng/ml. In some embodiments, the final concentration of IL-15 utilized is about 600 U/ml. In some embodiments, the final concentration of IL-15 utilized is about 2000 U/ml. In further embodiments, the final concentration of IL-15 utilized is greater than 2000 U/ml. In some embodiments, the final concentration of the IL-15 in the second medium is greater than 200 U/ml. In further embodiments, the final concentration of IL-15 in the second medium is greater than 200 U/ml to about 2000 U/ml. In a specific embodiment, the final concentration of IL-15 in the second medium is about 600 U/ml.

[0082] IL-7 is a cytokine secreted by stromal cells in the bone marrow and thymus. It is also produced by keratinocytes, dendritic cells, hepatocytes, neurons, and epithelial cells, but is not produced by normal lymphocytes. IL-7 stimulates the differentiation of multipotent (pluripotent) hematopoietic stem cells into lymphoid progenitor cells (as opposed to myeloid progenitor cells where differentiation is stimulated by IL-3). It also stimulates proliferation of all cells in the lymphoid lineage (B cells, T cells and NK cells). It is important for proliferation during certain stages of B-cell maturation, T and NK cell survival, development and homeostasis. An example nucleotide sequence for a human IL7 gene is the NCBI Reference Sequence: AH006906.2. An exemplary amino acid sequence of a human IL-7 polypeptide is provided as SEQ ID NO: 883.

[0083] As utilized in the methods provided herein, a final concentration of IL-7 can be from about 10 U/ml to about 7,000 U/ml. In some embodiments, the final concentration of IL-7 can be from about 5 ng/ml to about 3,500 ng/ml.

[0084] IL-21 is a cytokine that has potent regulatory effects on cells of the immune system, including natural killer (NK) cells and cytotoxic T cells that can destroy virally infected or cancerous cells. This cytokine induces cell division/proliferation in its target cells. IL-21 is expressed in activated human CD4+ T cells but not in most other tissues. In addition, IL-21 expression is up-regulated in Th2 and Th17 subsets of T helper cells, as well as T follicular cells. In fact, it was shown that IL-21 can be used to identify peripheral T follicular helper cells. Furthermore, IL-21 is expressed in NK T cells regulating the function of these cells. An example nucleotide sequence for a human IL21 gene is the NCBI Reference Sequence: LC133256.1. An exemplary amino acid sequence of a human IL-21 polypeptide is provided as SEQ ID NO: 884.

[0085] In some embodiments, the T cell-stimulating cytokine utilized in the methods herein is selected from the group consisting of IL-2, IL-7, IL-15, IL-21, and combinations thereof. In some embodiments, the final concentration of the T cell-stimulating cytokine utilized in the first medium is from about 10 U/ml to about 7,000 U/ml. In some embodiments, the final concentration of T cell-stimulating cytokine utilized in the first medium is from about 5 ng/ml to about 3,500 ng/ml.

[0086] In certain embodiments, the first medium utilized in the methods herein does not comprise IL-2, IL-21, or both IL-2 and IL-21. In certain embodiments, the second medium does not comprise IL-2, IL-21, or both IL-2 and IL-21. In specific embodiments, the first medium does not comprise IL-2. In specific embodiments, the second medium does not comprise IL-2. In specific embodiments, the first medium does not comprise IL-21. In specific embodiments, the second medium does not comprise IL-21.

[0087] In some embodiments, the second medium further comprises IL-7. In some embodiments, the final concentration of the IL-7 cytokine in the second medium is from about 10 U/ml to about 7,000 U/ml. In some embodiments, the final concentration of IL-7 in the second medium can be from about 5 ng/ml to about 3,500 ng/ml.

[0088] In some embodiments, the first medium utilized in the described methods is supplemented with the T cell-stimulating cytokine at a time interval selected from the group consisting of 1 day, 2 days, 3 days, 4 days, 5 days, and 6 days. In some embodiments, the first medium is changed at a time interval selected from the group consisting of 1 day, 2 days, 3 days, 4 days, 5 days, and 6 days. In one embodiment, 30% to 99% of the first medium is changed at a time interval selected from the group consisting of 1 day, 2 days, 3 days, 4 days, 5 days, and 6 days.

[0089] In some embodiments, the second medium utilized in the described methods is changed at a time interval selected from the group consisting of 1 day, 2 days, 3 days, 4 days, 5 days, and 6 days. In one embodiment, 30% to 99% of the second medium is changed at a time interval selected from the group consisting of 1 day, 2 days, 3 days, 4 days, 5 days, and 6 days.

[0090] As used herein, the term “fragment” used in association with agonist or antibody, refers to a fragment of the agonist or antibody that retains the ability to specifically bind to an antigen. Examples of fragments of antibodies include (i) an Fab fragment, a monovalent fragment consisting of the VL, VH, CL and CH1 domains; (ii) an F(ab′)2 fragment, a bivalent fragment comprising two Fab fragments linked by a disulfide bridge at the hinge region; (iii) an Fd fragment consisting of the VH and CH1 domains; (iv) an Fv fragment consisting of the VL and VH domains of a single arm of an antibody; (v) a dAb fragment, which comprises a single variable domain; and (vi) an isolated complementarity determining region (CDR). Furthermore, although the two domains of the Fv fragment, VL and VH, are encoded by separate genes, they can be joined, using recombinant methods, by a synthetic linker that enables them to be made as a single protein chain in which the VL and VH regions pair to form monovalent molecules (known as single chain Fv (scFv)). Such single chain antibodies are also intended to be encompassed within the term “antigen-binding portion” of an antibody. Other forms of single chain antibodies, such as diabodies are also encompassed. In addition, single chain antibodies also include “linear antibodies” comprising a pair of tandem Fv segments (VH-CH1-VH-CH1), which, together with complementary light chain polypeptides, form a pair of antigen binding regions.

[0091] The term “antibody” refers to an immunoglobulin (Ig) molecule, which is generally comprised of four polypeptide chains, two heavy (H) chains and two light (L) chains, or a functional fragment, mutant, variant, or derivative thereof, that retains the epitope binding features of an Ig molecule. Such fragment, mutant, variant, or derivative antibody formats are known in the art. In an embodiment of a full-length antibody, each heavy chain is comprised of a heavy chain variable region (VH) and a heavy chain constant region (CH). The heavy chain variable region (domain) is also designated as VDH in this disclosure. The CH is comprised of three domains, CH1, CH2 and CH3. Each light chain is comprised of a light chain variable region (VL) and a light chain constant region (CL). The CL is comprised of a single CL domain. The light chain variable region (domain) is also designated as VDL in this disclosure. The VH and VL can be further subdivided into regions of hypervariability, termed complementarity determining regions (CDRs), interspersed with regions that are more conserved, termed framework regions (FRs). Generally, each VH and VL is composed of three CDRs and four FRs, arranged from amino-terminus to carboxy-terminus in the following order: FR1, CDR1, FR2, CDR2, FR3, CDR3, and FR4. Immunoglobulin molecules can be of any type (e.g., IgG, IgE, IgM, IgD, IgA and IgY), class (e.g., IgG1, IgG2, IgG3, IgG4, IgA1 and IgA2), or subclass.

[0092] As used herein, the phrases “specific binding,” “specifically bind” “selective binding” or “selectively binds” are interchangeable and refer to a protein complex, such as an agonist, antagonist, antibody or soluble monospecific complex, interacting with high specificity with a particular antigen, as compared with other antigens for which the complex has a lower affinity to associate. The specific binding interaction can be mediated through ionic bonds, hydrogen bonds, or other types of chemical or physical associations. In certain embodiments, a protein complex specifically binds a particular antigen when it recognizes its target antigen in a complex mixture of proteins and/or macromolecules. Two or more agonist, antagonist, antibody or soluble monospecific complex “bind to the same epitope” if the agonists, antagonist, antibody, or soluble monospecific complex cross-compete (one prevents the binding or modulating effect of the other). Typically, the agonist, antagonist, antibody or soluble monospecific complex binds with an affinity (K_{D}) of approximately less than 10⁻⁵ M, such as approximately less than 10⁻⁶ M, 10⁻⁷ M, 10⁻⁸M, 10⁻⁹ M or 10⁻¹⁰ M or even lower.

[0093] The term “K_{D}” as used herein refers to the dissociation equilibrium constant of a particular agonist-antigen interaction. Typically, the agonists described herein bind to a target with a dissociation equilibrium constant (K_{D}) of less than approximately 10⁻⁶ M, 10⁻⁷ M, 10⁻⁸ M, 10⁻⁹ M or 10⁻¹⁰ M or even lower, for example, as determined using surface plasmon resonance (SPR) technology in a Biacore instrument using the agonist as the ligand and the target as the analyte, and bind to a target protein with an affinity corresponding to a K_{D} that is at least ten-fold lower, such as at least 100-fold lower, for instance at least 1000-fold lower, such as at least 10,000-fold lower, for instance at least 100,000-fold lower than its affinity for binding to a non-specific antigen (e.g., BSA, casein) other than the predetermined antigen or a closely-related antigen. The amount with which the affinity is lower is dependent on the K_{D} of the agonist, so that when the K_{D} of the agonist is very low (that is, the agonist is highly specific), the amount with which the affinity for the antigen is lower than the affinity for a non-specific antigen may be at least 10,000-fold.

[0094] The term “k_{off}” (sec⁻¹) as used herein refers to the dissociation rate constant of a particular agonist-antigen interaction. Said value is also referred to as the k_{d} value.

[0095] The term “kₒₙ” (M⁻¹×sec⁻¹) as used herein refers to the association rate constant of a particular agonist-antigen interaction.

[0096] The term “KD” (M) as used herein refers to the dissociation equilibrium constant of a particular agonist-antigen interaction.

[0097] The term “K_{A}” (M⁻¹) as used herein refers to the association equilibrium constant of a particular agonist-antigen interaction and is obtained by dividing the kₒₙ by the k_{off}.

[0098] As used herein, the phrase “anti-CD3 antibody” refers to an antibody or variant thereof, e.g., a monoclonal antibody, and includes human, humanized, chimeric or murine antibodies which are directed against the CD3 receptor in the T cell antigen receptor of mature T cells. Anti-CD3 antibodies include OKT-3, also known as muromonab. Anti-CD3 antibodies also include the UCHT1 clone, also known as T3 and CD3c. Other anti-CD3 antibodies include, for example, otelixizumab, teplizumab, and visilizumab.

[0099] As used herein, the phrase “anti-CD28 antibody” refers to an antibody or variant thereof, e.g., a monoclonal antibody, and includes human, humanized, chimeric or murine antibodies which are directed against the CD28 receptor in the T cell antigen receptor of mature T cells.

[0100] In some embodiments, an anti-4-1BB antibody can be utilized as a 4-1BB ligand. As used herein, the phrase “anti-4-1BB antibody” refers to an antibody or variant thereof, e.g., a monoclonal antibody, and includes human, humanized, chimeric or murine antibodies which are directed against 4-1BB.

[0101] As used herein, the phrase “anti-CD2 antibody” refers to an antibody or variant thereof, e.g., a monoclonal antibody, and includes human, humanized, chimeric or murine antibodies which are directed against the CD2 receptor in the T cell antigen receptor of mature T cells.

[0102] As used herein, the term “OKT-3” (also referred to herein as “OKT3”) refers to the anti-CD3 antibody produced by Miltenyi Biotech, Inc., San Diego, Calif., USA) and or biosimilar or variant thereof (e.g., a humanized, chimeric, or affinity matured variant). A hybridoma capable of producing OKT-3 is available in the American Type Culture Collection and assigned the ATCC accession number CRL 8001. A hybridoma capable of producing OKT-3 is available in the European Collection of Authenticated Cell Cultures (ECACC) and assigned Catalogue No. 86022706.

[0103] As used herein, the term “UCHT1” refers to the anti-CD3 antibody described in Beverley and Callard (1981) Eur. J. Immunol. 11: 329-334, and or biosimilar or variant thereof (e.g., a humanized, chimeric, or affinity matured variant). A hybridoma capable of producing an exemplary UCHT1 is available from Creative Diagnostics, Shirley, N.Y., USA, and assigned Catalogue No. CSC-H3068.

[0104] As used herein, the phrase “activation signal” refers to one or more non-endogenous stimuli that cause T cells to become activated. In the endogenous process, T cells become activated when they are presented with peptide antigens by MHC class II molecules, which are expressed on the surface of antigen-presenting cells (APCs). Once activated, the T cells divide rapidly and secrete cytokines that regulate or assist the immune response. The endogenous T cell activation process involves at least (a) activation of the TCR complex, which involves CD3, and (b) co-stimulation of CD28 or 4-1BB by proteins on the APC surface. It is known in the art that the endogenous activation of T cells can be simulated by stimulation of T cells by CD3, CD28 or 4-1BB agonists (e.g., antibodies). Thus, CD3, CD28 and/or 4-1BB can together provide an activation signal to T cells.

[0105] As used herein, the phrase “activating and inducing the population of TILs to proliferate” refers to the process of subjecting a population of TILs to activation signals, so that the TILs increase in number or proliferate and begin producing cytokines (activated TILs) to boost the immune response.

[0106] As used herein, the phrase “tumor cells” or “cancer cells” refers to cells that divide in an uncontrolled manner, forming solid tumors or flooding the blood with abnormal cells. Healthy cells stop dividing when there is no longer a need for more daughter cells, but tumor cells or cancer cells continue to produce copies. They are also able to spread from one part of the body to another in a process known as metastasis. Tumor cells can be isolated from a number of cancer types including bladder cancer, brain cancer, breast cancer (including triple negative breast cancer), cervical cancer, colon and rectal cancer, stomach cancer, endometrial cancer, renal cancer, lip and oral cancer, head and neck cancer (including, for example, head and neck squamous cell carcinoma (HNSCC)) gliobastoma, glioblastoma multiforme, neuroblastoma, liver cancer, mesothelioma, lung cancer (including non-small cell lung cancer (NSCLC) and small cell lung cancer), skin cancer (including but not limited to squamous cell carcinoma, basal cell carcinoma, nonmelanoma skin cancer and melanoma), ovarian cancer, uveal cancer, uterine cancer, pancreatic cancer, prostate cancer, sarcoma, and thyroid cancer. In some embodiments, cancer cells are also isolated from lymphoma. Tumor cells can be isolated from primary tumors and metastases.

[0107] As used herein, the phrase “tumor sample” refers to tumor cells isolated from a subject. In certain embodiments, a tumor sample is at least a portion of a solid tumor that is isolated in its entirety or in part from a subject or patient having a tumor. A tumor sample can be isolated from a number of cancer types, including bladder cancer, brain cancer, breast cancer (including triple negative breast cancer), cervical cancer, colon and rectal cancer, stomach cancer, endometrial cancer, renal cancer, lip and oral cancer, head and neck cancer (including, for example, head and neck squamous cell carcinoma (HNSCC)) glioblastoma, glioblastoma multiforme, neuroblastoma, liver cancer, mesothelioma, lung cancer (including non-small cell lung cancer (NSCLC) and small cell lung cancer), skin cancer (including but not limited to squamous cell carcinoma, basal cell carcinoma, nonmelanoma skin cancer and melanoma), ovarian cancer, uveal cancer, uterine cancer, pancreatic cancer, prostate cancer, sarcoma, and thyroid cancer. In some embodiments, cancer cells are also isolated from lymphoma. Tumor samples can be isolated from primary tumors and metastases.

[0108] As used herein, the phrase “disaggregated tumor sample” refers to a tumor sample that has been fragmented into “tumor fragments”. The fragmentation may be physical fragmentation, mechanical fragmentation, ultrasonic fragmentation, enzymatic fragmentation, or any combinations thereof. The fragmentation may initially be done mechanically (e.g., by dissection) and optionally be followed by enzymatic digestion of the tumor fragments into a single cell suspension. After enzymatic digestion, the tumor digests may be dissociated. In some embodiments, the tumor digests are mechanically dissociated. After dissociation, the resulting cell suspension may be subject to additional separation techniques to remove contaminating cells such as red blood cells. In some embodiments, mechanical disaggregation methods may include chopping or slicing the tumor into smaller tumor fragments, while enzymatic disaggregation methods may include treating the tumor fragments with specific enzymes, such as proteases.

[0109] As used herein, the phrase “T cell receptor agonist” or “TCR agonist” refers to an agonist of the T cell receptor complex. In some embodiments, the TCR agonist is an antibody. In one embodiment, the antibody is a humanized antibody. Suitable TCR agonists include, without limitation, CD3 agonists (e.g., anti-CD3 antibodies).

[0110] As used herein, the term “medium” refers to a liquid or gel designed to support the survival, growth, and/or proliferation of cells in an artificial environment. A medium generally comprises a defined set of components. Such components may include an energy source, growth factors, hormones, stimulants, activators, sugars, salts, vitamins, and/or amino acids, and/or a combination of these. In many embodiments, the medium is cell culture medium.

[0111] As used herein, the phrase “components of the medium are maintained” refers to a medium comprising a defined set of components, such as particular stimulants and activators, where the identity of the components remains constant, but the concentration of one or more of the components may be varied. In certain embodiments, the concentration of one or more components in the media varies over time while the cells are cultured in the media. However, when the media is changed the fresh media has the same components for each change.

[0112] As used herein, the phrase “feeder cell” refers to cells used to provide extracellular secretions that help another cell type proliferate. In certain embodiments, the feeder cells referred to herein are peripheral blood mononuclear cell (PBMC) or an antigen-presenting cell (APC).

[0113] As used herein, the phrase “recombinant agonist” refers to an agonist protein that is encoded by a recombinant gene, which has been cloned in a system that supports expression of the gene and translation of mRNA. The recombinant gene is designed to be under the control of a well characterized promoter and to express the target agonist protein within the chosen host cell to achieve high-level protein expression. Modification of the gene by recombinant DNA technology can lead to expression of a mutant protein or a large quantity of protein.

[0114] As used herein, the phrase “central memory T cell phenotype” refers to a subset of T cells that in the human are CD45RO+ and express CCR7 (CCR7^{hi}) and CD62L (CD62^{hi}). The surface phenotype of central memory T cells also includes TCR, CD3, CD127 (IL-7R), and, in some cases, IL-15R. Central memory cells are defined as functionally having the ability to recirculate to lymph nodes and the white pulp of the spleen, and exhibit stem cell characteristics in that they are able to both self-renew and differentiate into effector cells. Central memory T cells primarily secrete IL-2 and express CD40L as effector molecules after TCR triggering. Central memory T cells can be both CD4 and CD8 T cells, and in human beings are proportionally enriched in lymph nodes and tonsils.

[0115] As used herein, the term “nanomatrix” refers to a colloidal suspension of more than one matrix of polymer chains. A nanomatrix is a multiphase material that has dimensions of less than 500 nm or structures having nanoscale repeat distances between the different phases that make up the material. Polymers may include polyethylene, polypropylene, polystyrene, polysaccharide, dextran, and other macromolecules, which are composed of many repeated subunits. A nanomatrix may also have embedded additional functional compounds, such as magnetic, paramagnetic, or superparamagnetic nanocrystals. In addition, functional moieties, such as ligands or agonists can be covalently attached or bound to the polymer chains for specific applications.

[0116] As used herein, the term “matrix” or “mobile matrix” refers to a discrete, isolatable, three-dimensional lattice-type structure where the backbone of the structure can be flexible or mobile and can be composed of materials, such as polymers and ceramics. Being a three-dimensional structure, a matrix can have a smallest dimension and a largest dimension, such as a length. A mobile matrix may be of collagen, purified proteins, purified peptides, polysaccharides, glycosaminoglycans, or extracellular matrix compositions. A polysaccharide may include for example, cellulose ethers, starch, gum arabic, agarose, dextran, chitosan, hyaluronic acid, pectins, xanthan, guar gum, or alginate. Other polymers may include polyesters, polyethers, polyacrylates, polyacrylamides, polyamines, polyethylene imines, polyquaternium polymers, polyphosphazenes, polyvinylalcohols, polyvinylacetates, polyvinylpyrrolidones, block copolymers, or polyurethanes. The mobile matrix may comprise a polymer of dextran. “Matrices” refers to a collection of more than one matrix.

[0117] As used herein, the phrase “largest dimension” in the context of a matrix refers to the longest length of the matrix.

[0118] As used herein, the term “dextran” refers to a complex branched glucan, a polysaccharide derived from the condensation of glucose. Dextran chains are of varying lengths, from 3 to 2000 kilodaltons. The polymer main chain consists of α-1,6 glycosidic linkages between glucose monomers, with branches from α-1,3 linkages.

[0119] As used herein, the phrase “agonists bound to a nanomatrix” refers to agonists that are covalently attached to the polymer chains that comprise the matrices within the nanomatrix.

[0120] As used herein, the phrase “colloidal suspension” refers to a mixture in which one substance, such as a matrix, is suspended throughout another substance, such as a liquid. A colloidal suspension thus has a dispersed phase, i.e., the suspended substance, and a continuous phase, i.e., the medium of suspension, such as a liquid.

[0121] As used herein, the phrase “contacting the population of TILs with a nanomatrix” refers to bringing TILs and the nanomatrix together such that the TILs can associate with nanomatrix-bound functional moieties, such as ligands or agonists, or nanomatrix-embedded functional compounds, such as nanocrystals, through ionic, hydrogen-bonding, or other types of physical or chemical interactions.

[0122] As used herein, the term “nanocrystal” refers to a material particle having at least one dimension smaller than 100 nm, based on quantum dots and composed of atoms in either a single- or poly-crystalline arrangement. The size of nanocrystals distinguishes them from larger crystals.

[0123] As used herein, the phrase “magnetic, paramagnetic, or superparamagnetic nanocrystals” refers to nanocrystals that can be manipulated using magnetic fields. Such nanocrystals commonly consist of at least one component that is a magnetic material, such as iron, nickel, or cobalt.

[0124] As use herein, the phrase “colloidal polymer chains” refers to polymer chains that when linked to each other through covalent bonds or other physical or chemical interactions can form colloidal suspensions.

[0125] As used herein, the phrase “soluble monospecific complex” refers to a complex that comprises two binding proteins that are linked, either directly or indirectly, to each other and bind to the same antigen. The two binding proteins are soluble and not immobilized on a surface, particle, or bead.

[0126] As used herein, the phrase “tetrameric antibody complex” or “TAC” refers to a protein complex comprising two antibodies that act as the first and second agonists that are linked by one or two linker antibodies that bind the antibodies acting as first and second agonists. The linker antibodies may bind the constant region of the agonist antibodies, and where the constant regions are of different isotypes, a bi-specific antibody with one binding region for each isotype may also be used. Support for these complexes can also be found in U.S. Pat. No. 4,868,109, incorporated by reference herein in its entirety. In other embodiments, the antibodies, or antigen binding fragments thereof, that act as first and second ligands may be covalently or non-covalently bound by one or more linker molecules. Non-limiting examples of such linker molecules include avidin or streptavidin, which may be used to join biotinylated antibodies, such as antibodies with biotin moieties in the Fc region. In additional embodiments, tetrameric antibody complexes may be used as a mixture of complexes. This includes use of more than one species of complex in a mixture of complexes, wherein the complexes of the entire mixture can contact more than two different ligands.

[0127] As used herein, the phrase “RNA-guided nuclease” refers to a nucleic acid/protein complex based on naturally occurring Type II CRISPR-Cas systems, that is a programmable endonuclease that can be used to perform targeted genome editing. RNA-guided nucleases consist of two components: a short ˜100 nucleotide guide RNA (gRNA) that uses 20 variable nucleotides at its 5′ end to base pair with a target genomic DNA sequence and a nuclease, e.g., the Cas9 endonuclease, that cleaves the target DNA. RNA-guided nucleases include any naturally occurring CRISPR-Cas systems and variants thereof including naturally occurring Cas DNA endonuclease and variants thereof. Many of these CRISPR-Cas systems and Cas DNA endonucleases are specifically referred to herein.

[0128] As used herein, the term “Cas9” refers to CRISPR associated protein 9, a protein that plays a vital role in the immunological defense of certain bacteria against DNA viruses, and which is heavily utilized in genetic engineering applications. Cas9 is an RNA-guided DNA endonuclease enzyme associated with the CRISPR (clustered regularly interspaced short palindromic repeats) adaptive immunity system in Streptococcus pyogenes. Cas9 can interrogate sections of DNA by checking for sites complementary to a guide RNA (gRNA). If the DNA substrate is complementary to the gRNA, Cas9 cleaves the DNA. The target specificity of Cas9 stems from the gRNA:DNA complementarity and not modifications to the protein itself (like TALENs and Zinc-fingers). Versions of Cas9 that bind but do not cleave cognate DNA can be used to locate transcriptional activators or repressors to specific DNA sequences in order to control transcriptional activation and repression. Native Cas9 requires a guide RNA composed of two disparate RNAs that associate, the CRISPR RNA (crRNA) and the trans-activating crRNA (tracrRNA). Cas9 targeting has been simplified through the engineering of a chimeric single guide RNA.

[0129] As used herein, the phrase “dead Cas9” or “dCas9” refers to Cas9 endonuclease Dead, which is a mutant form of Cas9 whose endonuclease activity is removed through point mutations in its endonuclease domains. Similar to its unmutated form, dCas9 is used in CRISPR systems along with gRNAs to target specific genes or nucleotides complementary to the gRNA with PAM sequences that allow Cas9 to bind. Cas9 ordinarily has 2 endonuclease domains called the RuvC and HNH domains. The point mutations D10A and H840A change two important residues for endonuclease activity that ultimately results in its deactivation. Although dCas9 lacks endonuclease activity, it is still capable of binding to its guide RNA and the DNA strand that is being targeted because such binding is managed by other domains. This alone is often enough to attenuate if not outright block transcription of the targeted gene if the gRNA positions dCas9 in a way that prevents transcriptional factors and RNA polymerase from accessing the DNA. However, this ability to bind DNA can also be exploited for activation since dCas9 has modifiable regions, typically the N and C terminus of the protein, that can be used to attach transcriptional activators.

[0130] Furthermore, in accordance with the present disclosure there may be employed conventional molecular biology, microbiology, and recombinant DNA techniques within the skill of the art. Such techniques are explained fully in the literature. See, e.g., Sambrook, Fritsch & Maniatis, Molecular Cloning: A Laboratory Manual, Second Edition (1989) Cold Spring Harbor Laboratory Press, Cold Spring Harbor, N.Y. (herein “Sambrook et al., 1989”); DNA Cloning: A Practical Approach, Volumes I and II (D. N. Glover ed. 1985); Oligonucleotide Synthesis (M. J. Gait ed. 1984); Nucleic Acid Hybridization [B. D. Hames & S. J. Higgins eds. (1985)]; Transcription And Translation [B. D. Hames & S. J. Higgins, eds. (1984)]; Animal Cell Culture [R. I. Freshney, ed. (1986)]; Immobilized Cells And Enzymes [IRL Press, (1986)]; B. Perbal, A Practical Guide To Molecular Cloning (1984); F. M. Ausubel et al. (eds.), Current Protocols in Molecular Biology, John Wiley & Sons, Inc. (1994). Each of these references are incorporated by reference herein in its entirety.

[0131] Unless otherwise stated, sequence identity/similarity values provided herein refer to the value obtained using the BLAST 2.0 suite of programs using default parameters (Altschul, et al., (1997) Nucleic Acids Res. 25:3389-402, incorporated by reference herein in its entirety).

[0132] As used herein, “nucleic acid targeting sequence” and “nucleic acid binding sequence” are used interchangeably and refer to sequences that bind and/or target nucleic acids.

[0133] As used herein, “sequence identity” or “identity” in the context of two nucleic acid or polypeptide sequences includes reference to the residues in the two sequences, which are the same when aligned for maximum correspondence over a specified comparison window. When percentage of sequence identity is used in reference to proteins, it is recognized that residue positions which are not identical often differ by conservative amino acid substitutions, where amino acid residues are substituted for other amino acid residues with similar chemical properties (e.g., charge or hydrophobicity) and therefore do not change the functional properties of the molecule. Where sequences differ in conservative substitutions, the percent sequence identity may be adjusted upwards to correct for the conservative nature of the substitution. Sequences, which differ by such conservative substitutions, are said to have “sequence similarity” or “similarity.” Means for making this adjustment are well known to those of skill in the art. Typically this involves scoring a conservative substitution as a partial rather than a full mismatch, thereby increasing the percentage sequence identity. Thus, for example, where an identical amino acid is given a score of 1 and a non-conservative substitution is given a score of zero, a conservative substitution is given a score between zero and 1. The scoring of conservative substitutions is calculated, e.g., according to the algorithm of Meyers and Miller, (1988) Computer Applic. Biol. Sci. 4:11-17, e.g., as implemented in the program PC/GENE (Intelligenetics, Mountain View, Calif., USA). Each of these references are incorporated by reference herein in its entirety.

[0134] As used herein, “percentage of sequence identity” means the value determined by comparing two optimally aligned sequences over a comparison window, wherein the portion of the polynucleotide sequence in the comparison window may comprise additions or deletions (i.e., gaps) as compared to the reference sequence (which does not comprise additions or deletions) for optimal alignment of the two sequences. The percentage is calculated by determining the number of positions at which the identical nucleic acid base or amino acid residue occurs in both sequences to yield the number of matched positions, dividing the number of matched positions by the total number of positions in the window of comparison and multiplying the result by 100 to yield the percentage of sequence identity.

[0135] The term “substantial identity” or “substantially identical” in the context of polynucleotide sequences means that a polynucleotide comprises a sequence that has between 50-100% sequence identity, preferably at least 50% sequence identity, preferably at least 60% sequence identity, preferably at least 70%, more preferably at least 80%, more preferably at least 90% and most preferably at least 95%, compared to a reference sequence using one of the alignment programs described using standard parameters. One of skill will recognize that these values can be appropriately adjusted to determine corresponding identity of proteins encoded by two nucleotide sequences by considering codon degeneracy, amino acid similarity, reading frame positioning and the like. Substantial identity of amino acid sequences for these purposes normally means sequence identity of between 55-100%, preferably at least 55%, preferably at least 60%, more preferably at least 70%, 80%, 90% and most preferably at least 95%.

### Tumor Infiltrating Lymphocytes (TILs)

[0136] Tumor infiltrating lymphocytes or TILs are a population of cells originally obtained as white blood cells that have left the bloodstream of a subject and migrated into a tumor. TILs include, but are not limited to, CD8⁺ cytotoxic T cells (lymphocytes), Th1 and Th17 CD4⁺ T cells, and natural killer (NK) cells. TILs include both primary and secondary TILs. “Primary TILs” are those that are obtained from patient tissue samples as outlined herein (sometimes referred to as “freshly harvested”), and “secondary TILs” are any TIL cell populations that have been expanded or proliferated as discussed herein.

[0137] TILs can generally be defined either biochemically, using cell surface markers, or functionally, by their ability to infiltrate tumors and effect treatment. TILs can be generally categorized as expressing one or more of the following biomarkers: CD4, CD8, TCR αβ, TCRγδ, CD27, CD28, CD56, CCR7, CD45RA, CD45RO, CD95, PD-1, and CD25. Additionally, and alternatively, TILs can be functionally defined by their ability to infiltrate solid tumors upon reintroduction into a patient. TILs may further be characterized by potency; for example, TILS may be considered potent if, for instance, interferon gamma (IFNγ) release is greater than about 50 pg/ml, greater than about 100 pg/ml, greater than about 150 pg/ml, or greater than about 200 pg/ml upon TCR stimulation.

[0138] Adoptive cell therapy utilizing TILs cultured ex vivo by conventional TIL manufacturing processes involves at least two steps, namely at least one rapid expansion protocol (REP) step subsequent to a pre-REP step. Adoptive cell therapy has resulted in successful therapy following host immunosuppression in patients with melanoma. Current infusion acceptance parameters rely on readouts of the composition of TILs (e.g., CD28, CD8, or CD4 positivity) and on the numerical folds of expansion and viability of the REP product.

[0139] Experimental findings indicate that lymphodepletion prior to adoptive transfer of tumor-specific T lymphocytes plays a key role in enhancing treatment efficacy by eliminating regulatory T cells and competing elements of the immune system (“cytokine sinks”). Accordingly, some embodiments of the invention may utilize a lymphodepletion step (sometimes also referred to as “immunosuppressive conditioning”) on the patient prior to the introduction of the TILs of the invention. In some embodiments, a lymphodepletion step is not used. Thus, in some embodiments, the subject has undergone lymphodepletion prior to administration of TILs. In many studies, TILs are supported by administration of IL-2 to the subject to facilitate engraftment of the cells. Thus, in some embodiments, the subject receives IL-2 treatment with or after the administration of TILs. In some embodiments, the subject receives high dose or low-dose IL-2 treatment with or after the administration of TILs. In some embodiments, the subject has undergone lymphodepletion prior to administration of TILs as well as receiving IL-2 treatment with or after the administration of TILs. The IL-2 can be high or low dose.

[0140] However, the present disclosure also introduces advantageous manufacturing methods which, in some embodiments, remove the need for prior lymphodepletion and immunosuppressive conditioning or IL-2 administration. In such embodiments, the subject has not undergone lymphodepletion prior to administration of TILs. In some embodiments, the subject does not receive high-dose IL-2 treatment with or after the administration of TILs. In some embodiments, the subject does not receive any IL-2 treatment with or after the administration of TILs. In some embodiments, the subject has not undergone lymphodepletion prior to administration of TILs and does not receive high-dose IL-2 treatment with or after the administration of TILs. In some embodiments, the subject has not undergone lymphodepletion prior to administration of TILs and does not receive any IL-2 treatment with or after the administration of TILs.

### Expansion of TILs

[0141] As generally outlined herein, TILs are generally taken from a patient sample and manipulated to expand their number prior to transplant into a patient. In some embodiments, the TILs may be genetically manipulated as discussed below. In general, TILs are initially obtained from a patient tumor sample (“primary TILs”) and then expanded into a larger population for further manipulation as described herein, optionally cryopreserved and re-stimulated, and optionally evaluated for phenotype and metabolic parameters as an indication of TIL health.

[0142] A patient tumor sample may be obtained using methods known in the art, generally via surgical resection, needle biopsy, or other means for obtaining a sample that contains a mixture of tumor and TIL cells. In general, the tumor sample may be from any solid tumor, including primary tumors, invasive tumors or metastases. The solid tumor may be of any cancer type, including, but not limited to, bladder cancer, brain cancer, breast cancer (including triple negative breast cancer), cervical cancer, colon and rectal cancer, stomach cancer, endometrial cancer, renal cancer, lip and oral cancer, head and neck cancer (including, for example, head and neck squamous cell carcinoma (HNSCC)) gliobastoma, glioblastoma multiforme, neuroblastoma, liver cancer, mesothelioma, lung cancer (including non-small cell lung cancer (NSCLC) and small cell lung cancer), skin cancer (including but not limited to squamous cell carcinoma, basal cell carcinoma, nonmelanoma skin cancer and melanoma), ovarian cancer, uveal cancer, uterine cancer, pancreatic cancer, prostate cancer, sarcoma, and thyroid cancer. In some embodiments, useful TILs are obtained from malignant melanoma tumors, as these have been reported to have particularly high levels of TILs. Primary lung, (including non-small cell lung cancer (NSCLC)), bladder, cervical and melanoma tumors or metastases thereof can be used to obtain TILs.

[0143] A solid tumor is an abnormal mass of tissue that usually does not contain cysts or liquid areas. Solid tumors may be benign or malignant. Solid tumor cancer refers to malignant, neoplastic, or cancerous solid tumors. Solid tumor cancers include, but are not limited to, bladder cancer, brain cancer, breast cancer (including triple negative breast cancer), cervical cancer, colon and rectal cancer, stomach cancer, endometrial cancer, renal cancer, lip and oral cancer, head and neck cancer (including, for example, head and neck squamous cell carcinoma (HNSCC)) gliobastoma, glioblastoma multiforme, neuroblastoma, liver cancer, mesothelioma, lung cancer (including non-small cell lung cancer (NSCLC) and small cell lung cancer), skin cancer (including but not limited to squamous cell carcinoma, basal cell carcinoma, nonmelanoma skin cancer and melanoma), ovarian cancer, uveal cancer, uterine cancer, pancreatic cancer, prostate cancer, sarcoma, and thyroid cancer. The tissue structure of solid tumors includes interdependent tissue compartments, including the parenchyma (cancer cells) and the supporting stromal cells in which the cancer cells are dispersed, and which may provide a supporting microenvironment.

[0144] Once obtained, the tumor sample is generally fragmented using sharp dissection into small pieces of from about 1 to about 8 mm³, or from about 0.5 to about 4 mm³ with from about 2-3 mm³ being particularly useful. The TILs are cultured from these fragments using enzymatic tumor digests. Such tumor digests may be produced by incubation in enzymatic media (e.g., Roswell Park Memorial Institute (RPMI) 1640 buffer, 2 mM glutamate, 10 μg/ml gentamicin, 30 units/ml of DNase and 1.0 mg/ml of collagenase), followed by mechanical dissociation (e.g., using a tissue dissociator). Tumor digests may be produced by placing the tumor in enzymatic media and mechanically dissociating the tumor for approximately 1 minute, followed by incubation for 30 minutes at 37° C. in 5% CO₂, followed by repeated cycles of mechanical dissociation and incubation under the foregoing conditions until only small tissue pieces are present. At the end of this process, if the cell suspension contains a large number of red blood cells or dead cells, a density gradient separation using FICOLL branched hydrophilic polysaccharide may be performed to remove these cells. Alternative methods known in the art may be used, such as those described in U.S. Patent Application Publication No. 2012/0244133 A1, the disclosure of which is incorporated herein by reference in its entirety. Any of the foregoing methods may be used in any of the embodiments described herein for methods of expanding TILs or methods treating a cancer.

[0145] In general, the harvested cell suspension is called a “primary cell population” or a “freshly harvested” cell population. In some embodiments, fragmentation includes physical fragmentation, including for example, dissection as well as digestion. In some embodiments, the fragmentation is physical fragmentation. In some embodiments, the fragmentation is dissection. In some embodiments, the fragmentation is by digestion. In some embodiments, TILs can be initially cultured from enzymatic tumor digests and tumor fragments obtained from patients.

[0146] In some embodiments, where the tumor is a solid tumor, the tumor undergoes physical fragmentation after the tumor sample is obtained. In some embodiments, the fragmentation occurs before cryopreservation. In some embodiments, the fragmentation occurs after cryopreservation. In some embodiments, the fragmentation occurs after obtaining the tumor and in the absence of any cryopreservation. In some embodiments, the tumor is fragmented and 10, 20, 30, 40 or more fragments or pieces are placed in each container for the first expansion. In some embodiments, the tumor is fragmented, and 30 or 40 fragments or pieces are placed in each container for the first expansion. In some embodiments, the tumor is fragmented, and 40 fragments or pieces are placed in each container for the first expansion. In some embodiments, the multiple fragments comprise about 4 to about 50 fragments, wherein each fragment has a volume of about 27 mm³. In some embodiments, the multiple fragments comprise about 30 to about 60 fragments with a total volume of about 1300 mm³ to about 1500 mm³. In some embodiments, the multiple fragments comprise about 50 fragments with a total volume of about 1350 mm³. In some embodiments, the multiple fragments comprise about 50 fragments with a total mass of about 1 gram to about 1.5 grams. In some embodiments, the multiple fragments comprise about 4 fragments.

[0147] In some embodiments, the TILs are obtained from tumor fragments. In some embodiments, the tumor fragment is obtained by sharp dissection. In some embodiments, the tumor fragment is between about 1 mm³ and 10 mm³. In some embodiments, the tumor fragment is from about 1 mm³ and 8 mm³. In some embodiments, the tumor fragment is from about 0.5 mm³ and 4 mm³. In some embodiments, the tumor fragment is about 1 mm³. In some embodiments, the tumor fragment is about 2 mm³. In some embodiments, the tumor fragment is about 3 mm³. In some embodiments, the tumor fragment is about 4 mm³. In some embodiments, the tumor fragment is about 5 mm³. In some embodiments, the tumor fragment is about 6 mm³. In some embodiments, the tumor fragment is about 7 mm³. In some embodiments, the tumor fragment is about 8 mm³. In some embodiments, the tumor fragment is about 9 mm³. In some embodiments, the tumor fragment is about 10 mm³.

[0148] In some embodiments, the TILs are obtained from tumor digests. In some embodiments, tumor digests are generated by incubation of mechanically dissociated tumor in enzyme media, for example, but not limited to RPMI 1640, 2 mM GlutaMAX, 10 mg/ml gentamicin, 30 U/ml DNase, and 1.0 mg/ml collagenase, followed by mechanical dissociation (GentleMACS, Miltenyi Biotec, Auburn, Calif.). In some embodiments, the mechanically dissociated tumor would be broken up into approximately 1 mm³ pieces. After placing the tumor in enzyme media, the tumor can be mechanically dissociated for approximately 1 minute. The solution can then be incubated for 30 minutes at 37° C. in 5% CO₂ and can then be mechanically disrupted again for approximately 1 minute. After being incubated again for 30 minutes at 37° C. in 5% CO₂, the tumor can be mechanically disrupted a third time for approximately 1 minute. In some embodiments, after the third mechanical disruption if large pieces of tissue are present, one or two additional mechanical dissociations can be applied to the sample, with or without 30 additional minutes of incubation at 37° C. in 5% CO₂. In some embodiments, at the end of the final incubation if the cell suspension contains a large number of red blood cells or dead cells, a density gradient separation using FICOLL can be performed to remove these cells.

[0149] In some embodiments, cells can be optionally frozen or cryopreserved after sample harvest and stored frozen prior to entry into the expansion phase.

[0150] In some embodiments, the methods herein can rescue TIL samples from a previously failed pre-REP expansion. In certain embodiments, the tumor sample is isolated from a subject who has previously had a sample subject to a TIL expansion technique. In some embodiments, the previous TIL expansion technique comprised a pre-REP expansion. In some embodiments, the pre-REP expansion comprises administration of IL-2 to a disaggregated tumor sample from the subject. In some embodiments, in the pre-REP expansion the only T cell-stimulating cytokine administered to the tumor sample or the TILs expanded from the tumor sample is IL-2. In some embodiments, the previous TIL expansion technique failed. In some embodiments, a TIL expansion technique fails when it does not expand an adequate number of TILs. In some embodiments, an adequate number of TILs is greater than 1000, 5000, 10,000, 20,000, 30,000, 40,000, 50,000, 60,000, 70,000, 80,000, 90,000 or 100,000 TILs. In some embodiments, a TIL expansion technique fails when it does not induce an adequate fold expansion of the TILs. In some embodiments, an adequate fold expansion of TILs is greater than 50-, 100-, 1000-, 2000-, 3000-, 4000-, 5000-, 6000-, 7000-, 8000-, 9000- or 10,000-fold expansion. In some embodiments, a portion of the same tumor sample is used in the previous TIL expansion technique and the TIL expansion methods disclosed, herein. In some embodiments, two distinct samples are isolated from the same subject. In some embodiments, the methods described herein are able to provide greater numbers or fold expansion of TILs than the previous expansion technique. In some embodiments, the methods described herein are able to provide a clinically useful number of TILs, wherein the previous expansion technique was unable to provide that number of TILs.

### Overview of Two Step Methods for TIL Expansion

[0151] In certain methods of activating and expanding TILs, a multi-step process is employed, in addition to the use of feeder cells. This multi-step process includes at least one rapid expansion protocol (REP) step, preceded by a separate pre-REP step.

### First Expansion Step in Multi-Step TIL Manufacture: Pre-REP

[0152] A multi-step TIL manufacture process begins with a pre-REP or first expansion. Generally, pre-REP is initiated using a tumor sample that has been fragmented and/or enzymatically digested and to which one or more T cell-stimulating cytokines selected from IL-2, IL-7, IL-15, IL-21, and combinations thereof is added for slow cytokine-driven growth of the TILs within the tumor sample. The pre-REP or first expansion step can take anywhere between 2 weeks and a few months. Pre-REP can begin with obtaining young TILs, which are capable of increased replication cycles upon administration to a subject/patient and as such may provide additional therapeutic benefits over older TILs (i.e., TILs that have further undergone more rounds of replication prior to administration to a subject/patient).

[0153] In some embodiments, during pre-REP tumor tissue or cells from tumor tissue are grown in standard lab media (including without limitation RPMI) and treated the with reagents such as irradiated feeder cells and anti-CD3 antibodies to achieve a desired effect, such as increase in the number of TILs and/or an enrichment of the population for cells containing desired cell surface markers or other structural, biochemical or functional features. Pre-REP may utilize lab grade reagents (under the assumption that the lab grade reagents get diluted out during a later REP stage), making it easier to incorporate alternative strategies for improving TIL production. Therefore, in some embodiments, the disclosed TLR agonist and/or peptide or peptidomimetics can be included in the culture medium during the pre-REP stage. The pre-REP culture can in some embodiments, include IL-2.

[0154] In some cases, after dissection or digestion of tumor fragments, the resulting cells are cultured in media containing one or more T cell-stimulating cytokines selected from IL-2, IL-7, IL-15, IL-21, and combinations thereof under conditions that favor the growth of TILs over tumor and other cells. In standard methods in the art, tumor digests are incubated in 2 ml wells in media comprising inactivated human AB serum with 6000 U/ml of IL-2 without IL-7, IL-15 or IL-21. In some embodiments of the present invention, 300-6000 U/ml of IL-2 is added. In some embodiments of the present invention, 100-5000 ng/ml of IL-15 is added. In some embodiments of the present invention, from 10 U/ml to 7,000 U/ml of IL-7 and/or IL-21 is added. In some embodiments of the present invention, 100-5000 ng/ml of IL-15 is added and from 10 U/ml to 7,000 U/ml of IL-7 or IL-21 is added. In some embodiments of the present invention, 100-5000 ng/ml of IL-15 is added, 300-6000 U/ml of IL-2 is added and from 10 U/ml to 7,000 U/ml of IL-7 and/or IL-21 is added. During pre-REP, this primary cell population is cultured for a period of days to months, resulting in a bulk TIL population, generally about 1×10⁸ bulk TIL cells.

[0155] In one aspect, the present disclosure provides methods of expanding a population of TILs in a disaggregated tumor sample comprising culturing the disaggregated tumor sample in a culture medium comprising IL-15, thereby expanding the population of TILs. In some embodiments, the culture medium does not comprise IL-2, IL-21, or both IL-2 and IL-21. In some embodiments, the final concentration of IL-15 in the culture medium is greater than 0.5 ng/ml. In some embodiments, the final concentration of IL-15 in the culture medium is greater than 1 ng/ml. In some embodiments, the final concentration of IL-15 in the culture medium is greater than 10 ng/ml. In some embodiments, the final concentration of IL-15 in the culture medium is greater than 100 ng/ml. In some embodiments, the final concentration of IL-15 utilized is less than 10,000 ng/ml, optionally less than 9000, 8000, 7000, 6000, 5000, 4000, 3000, 2000, or 1000 ng/ml.

[0156] In some embodiments, the final concentration of IL-15 in the culture medium is greater than 1 U/ml. In some embodiments, the final concentration of IL-15 in the culture medium is greater than 2 U/ml. In some embodiments, the final concentration of IL-15 in the culture medium is greater than 20 U/ml. In some embodiments, the final concentration of IL-15 in the culture medium is greater than 200 U/ml. In some embodiments, the final concentration of IL-15 utilized is less than 20,000 U/ml, optionally less than 18,000, 16,000, 14,000, 12,000, 10,000, 8000, 6000, 4000, or 2000 U/ml.

[0157] In some cases, during the pre-REP or first expansion step, TIL cultures are initiated by the explant of small (˜2 mm³) tumor fragments or by plating 1×10⁶ viable cells of a single cell suspension of enzymatically digested tumor tissue into 2 ml of complete medium (RPMI1640 based medium supplemented with 10% human serum) containing one or more T cell-stimulating cytokines. The cultures are maintained at cell concentrations from 5×10⁵ to 2×10⁶ cells per ml until several million TIL cells are available, usually 2-4 weeks. Multiple independent cultures are screened by cytokine secretion assay for recognition of autologous tumor cells (if available) and HLA-A2+ tumor cell lines. Two to six independent TIL cultures exhibiting the highest cytokine secretion are then further expanded in complete medium with 6000 U per ml IL-2 until the cell number is over 5×10⁷ cells (this cell number is typically reached 3-6 weeks after tumor excision).

[0158] In some cases, the first expansion during pre-REP is performed in a closed system bioreactor, such as G-REX-10 or a G-REX-100.

[0159] In the case where genetically modified TILs are to be used in therapy, the first TIL population (also referred to as the bulk TIL population) can be subjected to genetic modifications prior to the second expansion in the REP step.

[0160] In conventional processes that incorporate the pre-REP step, the demarcation between the pre-REP and the REP occurs once TIL have undergone expansion in the presence of IL-2 and have either reached an appropriate cell number required to initiate a REP or have undergone a pre-REP for a predetermined period of time. In various embodiments, a pre-REP may be complete when the number of TIL obtained is 1×10⁶, 10×10⁶, 4×10⁶ or 40×10⁶ cells, depending on the manufacturing protocol used. In another embodiment, a pre-REP may be complete when the duration of culture reached is 3 to 14 days or up to 9 to 14 days from when fragmentation occurs. TIL may then either directly cryopreserved for further use, or transitioned to the REP.

[0161] In some cases, the TILs obtained from the pre-REP or first expansion step are stored until phenotyped for selection. In some cases, the TILs obtained from the first expansion are not stored and proceed directly to the second expansion or REP step. In some cases, the TILs obtained from the pre-REP step are not cryopreserved after the first expansion and prior to the second expansion or REP step.

### Second and Subsequent Expansion Steps in Multi-Step TIL Manufacture: REP

[0162] In multi-step TIL manufacture, in some cases, the TIL cell population is expanded in number after harvest and initial bulk processing, i.e., pre-REP. This further expansion is referred to as the second expansion, which can include expansion processes generally referred to in the art as a rapid expansion protocol (REP). The second expansion or REP is generally accomplished using a culture media comprising a number of components, including feeder cells, a cytokine source, and an anti-CD3 antibody, in a gas-permeable container. In some cases, the second expansion or REP can be performed using any TIL flasks or containers known by those of skill in the art and can proceed for 7-14 days or longer. In some embodiments, the second and subsequent steps are feeder cell free.

[0163] In some cases, the second expansion or REP can be performed in a gas permeable container using methods known in the art. For example, TILs can be rapidly expanded using non-specific T-cell receptor stimulation in the presence of one or more T cell-stimulating cytokines selected from IL-2, IL-7, IL-15, IL-21, and combinations thereof. The non-specific T-cell receptor stimulus can include, for example, an anti-CD3 antibody, such as about 30 ng/ml of OKT3, a mouse monoclonal anti-CD3 antibody (commercially available from Ortho-McNeil, Raritan, N.J. or Miltenyi Biotech, Auburn, Calif.) or UCHT-1 (commercially available from BioLegend, San Diego, Calif., USA). TILs can be expanded to induce further stimulation of the TILs in vitro by including one or more antigens during the second expansion, including antigenic portions thereof, such as epitope(s), of the cancer, which can be optionally expressed from a vector, such as a human leukocyte antigen A2 (HLA-A2) binding peptide, e.g., 0.3 μM MART-1:26-35 (27 L) or gpl 00:209-217 (210M), optionally in the presence of a T-cell growth factor, such as 300 U/ml IL-2. Other suitable antigens may include, e.g., NY-ESO-1, TRP-1, TRP-2, tyrosinase cancer antigen, MAGE-A3, SSX-2, and VEGFR2, or antigenic portions thereof. TILs may also be rapidly expanded by re-stimulation with the same antigen(s) of the cancer pulsed onto MHC haplotype matched antigen-presenting cells Alternatively, the TILs can be further re-stimulated with, e.g., irradiated, autologous lymphocytes or with irradiated HLA-A2+ allogeneic lymphocytes and IL-2. In some embodiments, the re-stimulation occurs as part of the second expansion. In some embodiments, the second expansion occurs in the presence of irradiated, autologous lymphocytes or with irradiated HLA-A2+ allogeneic lymphocytes and IL-2.

[0164] In some cases, the second expansion or REP can be conducted in a supplemented cell culture medium comprising one or more T cell-stimulating cytokines IL-2, IL-7, IL-15, IL-21, and combinations thereof, OKT-3, and antigen-presenting feeder cells. In some cases, the antigen-presenting feeder cells (APCs) are PBMCs (peripheral blood mononuclear cells). In some cases, the ratio of TILs to PBMCs and/or antigen-presenting cells in the rapid expansion and/or the second expansion is 1 to 25 and 1 to 500. In some cases, REP and/or the second expansion is performed in flasks with the bulk TILs being mixed with a 100- or 200-fold excess of inactivated feeder cells, 30 mg/ml OKT3 anti-CD3 antibody and 3000 U/ml IL-2 in 150 ml media. Media replacement is done (generally ½ or ⅔ media replacement via respiration with fresh media) until the cells are transferred to an alternative growth chamber. Alternative growth chambers include G-REX flasks and other gas permeable containers.

[0165] In one aspect, the second expansion or REP can be conducted in a supplemented cell culture medium comprising IL-15, thereby expanding the population of TILs. In some embodiments, the culture medium does not comprise IL-2, IL-21, or both IL-2 and IL-21. In some embodiments, the final concentration of IL-15 in the culture medium is greater than 0.5 ng/ml. In some embodiments, the final concentration of IL-15 in the culture medium is greater than 1 ng/ml. In some embodiments, the final concentration of IL-15 in the culture medium is greater than 10 ng/ml. In some embodiments, the final concentration of IL-15 in the culture medium is greater than 100 ng/ml. In some embodiments, the final concentration of IL-15 in the culture medium is greater than 100 ng/ml. In some embodiments, the final concentration of IL-15 utilized is less than 10,000 ng/ml, optionally less than 9000, 8000, 7000, 6000, 5000, 4000, 3000, 2000, or 1000 ng/ml.

[0166] In some embodiments, the final concentration of IL-15 in the culture medium is greater than 1 U/ml. In some embodiments, the final concentration of IL-15 in the culture medium is greater than 2 U/ml. In some embodiments, the final concentration of IL-15 in the culture medium is greater than 20 U/ml. In some embodiments, the final concentration of IL-15 in the culture medium is greater than 200 U/ml. In some embodiments, the final concentration of IL-15 utilized is less than 20,000 U/ml, optionally less than 18,000, 16,000, 14,000, 12,000, 10,000, 8000, 6000, 4000, or 2000 U/ml.

[0167] In some cases, the second expansion or REP is performed and further comprises a step wherein TILs are selected for superior tumor reactivity. Any selection method known in the art may be used. For example, the methods described in U.S. Patent Application Publication No. 2016/0010058 A1, the disclosure of which is incorporated herein by reference in its entirety, may be used for selection of TILs for superior tumor reactivity. Optionally, a cell viability assay can be performed after the second expansion (including expansions referred to as the REP expansion), using standard assays known in the art. For example, a trypan blue exclusion assay can be done on a sample of the bulk TILs, which selectively labels dead cells and allows a viability assessment. In some cases, TIL samples can be counted and viability determined using a Cellometer K2 automated cell counter (Nexcelom Bioscience, Lawrence, Mass.).

[0168] In some cases, further expansion steps can be performed in addition to the second expansion.

[0169] In some embodiments, the one or more T cell-stimulating cytokines utilized in the methods described herein is selected from the group consisting of IL-2, IL-7, IL-15, IL-21, and combinations thereof. In some embodiments, the final concentration of the T cell-stimulating cytokine utilized in the first medium is about 10 U/ml to about 7,000 U/ml.

[0170] In certain embodiments, the medium utilized in the pre-REP methods described herein does not comprise IL-2, IL-21, or both IL-2 and IL-21. In certain embodiments, the medium utilized in the REP methods does not comprise IL-2, IL-21, or both IL-2 and IL-21. In specific embodiments, the medium utilized in the pre-REP methods does not comprise IL-2. In specific embodiments, the medium utilized in the REP methods does not comprise IL-2. In specific embodiments, the medium utilized in the pre-REP methods does not comprise IL-21. In specific embodiments, the medium utilized in the REP methods does not comprise IL-21.

[0171] In some embodiments, the medium utilized in the REP methods further comprises IL-7. In some embodiments, the final concentration of the IL-7 cytokine in the medium utilized in the REP methods is about 10 U/ml to about 7,000 U/ml.

[0172] In some embodiments, the medium utilized in the pre-REP methods is supplemented with the T cell-stimulating cytokine at a time interval selected from the group consisting of 1 day, 2 days, 3 days, 4 days, 5 days, and 6 days. In some embodiments, the medium utilized in the pre-REP methods is changed at a time interval selected from the group consisting of 1 day, 2 days, 3 days, 4 days, 5 days, and 6 days. In one embodiment, 30% to 99% of the medium utilized in the pre-REP methods is changed at a time interval selected from the group consisting of 1 day, 2 days, 3 days, 4 days, 5 days, and 6 days.

[0173] In some embodiments, the medium utilized in the REP methods is changed at a time interval selected from the group consisting of 1 day, 2 days, 3 days, 4 days, 5 days, and 6 days. In one embodiment, 30% to 99% of the medium utilized in the REP methods is changed at a time interval selected from the group consisting of 1 day, 2 days, 3 days, 4 days, 5 days, and 6 days.

### Feeder Cells

[0174] In many cases, the feeder cells used in the multi-step feeder cell-based TIL expansion method are peripheral blood mononuclear cells (PBMCs) obtained from standard whole blood units from healthy blood donors. The PBMCs are obtained using standard methods such as FICOLL-Paque gradient separation. In general, the allogeneic PBMCs are inactivated, either via irradiation or heat treatment, and used in the REP procedures. In some cases, PBMCs are considered replication incompetent and accepted for use in TIL expansion procedures if the total number of viable cells after 14 days of culture is less than the initial viable cell number put into culture on day 0.

[0175] In some cases, PBMCs are considered replication incompetent and accepted for use in the TIL expansion procedures described herein if the total number of viable cells, cultured in the presence of OKT3 and IL-2, on day 7 and day 14 has not increased from the initial viable cell number put into culture on day 0 of the REP and/or day 0 of the second expansion (i.e., the start day of the second expansion). In some cases, the PBMCs are cultured in the presence of 30 ng/ml OKT3 antibody and 3000 U/ml IL-2.

[0176] In some cases, the second expansion or REP procedure requires a ratio of about 2.5×10⁹ feeder cells to between 12.5×10⁶ TILs and 100×10⁶ TILs.

[0177] After the second expansion step or REP, cells can be harvested. In some embodiments the TILs are harvested after one, two, three, four or more expansion steps. TILs can be harvested in any appropriate and sterile manner, including for example by centrifugation. Methods for TIL harvesting are well known in the art and any such known methods can be employed with the present process.

[0178] In some embodiments, the feeder cells express the TCR agonist. In some embodiments, the feeder cells express an agonist of a T cell costimulatory molecule. In some embodiments, the TCR agonist and/or agonist of a T cell costimulatory molecule are expressed on the surface of the feeder cells.

[0179] In one embodiment, the agonist of a T cell costimulatory molecule is a CD28 agonist. In one embodiment, the agonist of a T cell costimulatory molecule is a CD137 (i.e., 4-1BB) agonist. In one embodiment, the agonist of a T cell costimulatory molecule is a CD2 agonist.

[0180] In some embodiments, a 4-1BB ligand is expressed on the surface of the feeder cells.

[0181] In some embodiments, the feeder cells are genetically modified to express IL-15, IL-7, or both IL-15 and IL-7.

### One-Step Method for Expanding and Activating TILs

[0182] In one aspect of the one-step process disclosed herein, the pre-REP step of the multi-step TIL expansion protocol is skipped altogether. Significant numbers of TILs can be obtained in 21 days or less during this single expansion step without the use of a pre-REP step, i.e., in a one-step TIL activation and expansion process. In some embodiments, TILs are expanded using a one-step REP-like process depending on feeder cells. In some embodiments, TILs are expanded using a one-step REP-like process that is feeder cell free. In some embodiments, TILs are expanded in a one-step process using particles, such as Dynabeads. In some embodiments, TILs are expanded in a one-step process using tetrameric antibody complexes (TACs), such as the Immunocult Human T cell Activator from Stemcell Technologies. In some embodiments, TILs are expanded in a one-step process using nanomatrices, such as T cell Transact from Miltenyi Biotec. In some embodiments, TILs are engineered or genetically modified during the one-step TIL expansion process.

[0183] In some embodiments, the TILs are from previous failures using the pre-REP described above. In certain embodiments, a pre-REP failure is a failure to expand TILs isolated from a human subject to 4×10⁷ cells in 23 days using the pre-REP protocol. In other embodiments, a pre-REP failure is a failure to expand TILs isolated from a human subject to more than 100× the original number. In other embodiments, a pre-REP failure is a failure to expand TILs isolated from a human subject to 1×10⁶ or 1×10⁷ cells using the pre-REP protocol. In certain embodiments, the methods provided herein are able to rescue pre-REP failures, i.e., expand cells from samples that have experienced a pre-REP failure.

[0184] In one aspect of the method disclosed herein, the method of expanding a population of TILs in a disaggregated tumor sample comprises culturing the disaggregated tumor sample in a medium, wherein the TILs are contacted with a T cell receptor (TCR) agonist, a CD28 agonist, and a T cell-stimulating cytokine. In some embodiments, the TILs are contacted with a 4-1BB agonist.

[0185] In some embodiments, the disaggregated tumor sample comprises tumor fragments (for example, those generated by mechanical methods) that are 0.5 to 4 mm³ in size. In some embodiments, the tumor fragments are 0.5 to 1 mm³ in size. In some embodiments, the tumor fragments are 1 to 1.5 mm³ in size. In some embodiments, the tumor fragments are 1.5 to 2 mm³ in size. In some embodiments, the tumor fragments are 2 to 2.5 mm³ in size. In some embodiments, the tumor fragments are 2.5 to 3 mm³ in size. In some embodiments, the tumor fragments are 3 to 3.5 mm3 in size. In some embodiments, the tumor fragments are 3.5 to 4 mm³ in size. In some embodiments, the disaggregated tumor sample comprises digested tumor fragments.

[0186] In some embodiments, the disaggregated tumor sample comprises tumor fragments (for example, those generated by dissection methods) that are 25 to 30 mm³ in size. In some embodiments, the tumor fragments are 25 to 26 mm³ in size. In some embodiments, the tumor fragments are 25 to 27 mm³ in size. In some embodiments, the tumor fragments are 25 to 28 mm³ in size. In some embodiments, the tumor fragments are 25 to 29 mm³ in size. In some embodiments, the tumor fragments are 25 to 30 mm³ in size. In some embodiments, the tumor fragments are 26 to 28 mm³ in size. In some embodiments, the tumor fragments are 25, 26, 27, 28, 29 or 30 mm³ in size. In some embodiments, the disaggregated tumor sample comprises digested tumor fragments.

[0187] In some embodiments, the medium is supplemented with the T cell-stimulating cytokine at a time interval ranging from 1-2 days, 2-3 days, 3-4 days, 4-5 days, or 5-6 days. In some embodiments, the time interval is 1 day. In some embodiments, the time interval is 2 days. In some embodiments, the time interval is 3 days. In some embodiments, the time interval is 4 days. In some embodiments, the time interval is 5 days. In some embodiments, the time interval is 6 days.

[0188] In some embodiments, the final concentration of the T cell-stimulating cytokine is 10 U/ml to 7,000 U/ml. In some embodiments, the final concentration of the T cell-stimulating cytokine is 100 U/ml to 200 U/ml. In some embodiments, the final concentration of the T cell-stimulating cytokine is 200 U/ml to 300 U/ml. In some embodiments, the final concentration of the T cell-stimulating cytokine is 300 U/ml to 400 U/ml. In some embodiments, the final concentration of the T cell-stimulating cytokine is 400 U/ml to 500 U/ml. In some embodiments, the final concentration of the T cell-stimulating cytokine is 500 U/ml to 600 U/ml. In some embodiments, the final concentration of the T cell-stimulating cytokine is 600 U/ml to 700 U/ml. In some embodiments, the final concentration of the T cell-stimulating cytokine is 700 U/ml to 800 U/ml. In some embodiments, the final concentration of the T cell-stimulating cytokine is 800 U/ml to 900 U/ml. In some embodiments, the final concentration of the T cell-stimulating cytokine is 900 U/ml to 1000 U/ml. In some embodiments, the final concentration of the T cell-stimulating cytokine is 1,000 U/ml to 1,500 U/ml. In some embodiments, the final concentration of the T cell-stimulating cytokine is 1,500 U/ml to 2,000 U/ml. In some embodiments, the final concentration of the T cell-stimulating cytokine is 2,000 U/ml to 2,500 U/ml. In some embodiments, the final concentration of the T cell-stimulating cytokine is 2,500 U/ml to 3,000 U/ml. In some embodiments, the final concentration of the T cell-stimulating cytokine is 3,000 U/ml to 3,500 U/ml. In some embodiments, the final concentration of the T cell-stimulating cytokine is 3,500 U/ml to 4,000 U/ml. In some embodiments, the final concentration of the T cell-stimulating cytokine is 4,000 U/ml to 4,500 U/ml. In some embodiments, the final concentration of the T cell-stimulating cytokine is 4,500 U/ml to 5,000 U/ml. In some embodiments, the final concentration of the T cell-stimulating cytokine is 5,000 U/ml to 5,500 U/ml. In some embodiments, the final concentration of the T cell-stimulating cytokine is 5,500 U/ml to 6,000 U/ml. In some embodiments, the final concentration of the T cell-stimulating cytokine is 6,000 U/ml to 6,500 U/ml. In some embodiments, the final concentration of the T cell-stimulating cytokine is 6,500 U/ml to 7,000 U/ml.

[0189] In some embodiments, the final concentration of the T cell-stimulating cytokine is 100-10,000 ng/ml. In some embodiments, the final concentration of T cell-stimulating cytokine utilized is less than 10,000 ng/ml, optionally less than 9000, 8000, 7000, 6000, 5000, 4000, 3000, 2000, or 1000 ng/ml. In some embodiments, the final concentration of T cell-stimulating cytokine utilized is about 300 ng/ml. In some embodiments, the final concentration of T cell-stimulating cytokine utilized is about 1000 ng/ml. In further embodiments, the final concentration of T cell-stimulating cytokine utilized is greater than 1000 ng/ml. In some embodiments, the final concentration of the T cell-stimulating cytokine in the second medium is greater than 100 ng/ml. In further embodiments, the final concentration of T cell-stimulating cytokine in the second medium is greater than 100 ng/ml to about 1000 ng/ml. In a specific embodiment, the final concentration of T cell-stimulating cytokine in the second medium is about 300 ng/ml.

[0190] The T-cell stimulating cytokine can be any cytokine effective in stimulating T-cells. In some embodiments, the T cell-stimulating cytokine is IL-2, IL-7, IL-15 and/or IL-21.

[0191] In another aspect, the present disclosure provides methods of expanding a population of TILs in a disaggregated tumor sample comprising culturing the disaggregated tumor sample in a culture medium comprising feeder cells; a TCR agonist; and IL-15, thereby expanding the population of TILs. In some embodiments, the culture medium does not comprise IL-2, IL-21, or both IL-2 and IL-21. In some embodiments, the final concentration of IL-15 in the culture medium is greater than 0.5 ng/ml. In some embodiments, the final concentration of IL-15 in the culture medium is greater than 1 ng/ml. In some embodiments, the final concentration of IL-15 in the culture medium is greater than 10 ng/ml. In some embodiments, the final concentration of IL-15 in the culture medium is greater than 100 ng/ml. In some embodiments, the final concentration of IL-15 utilized is less than 10,000 ng/ml, optionally less than 9000, 8000, 7000, 6000, 5000, 4000, 3000, 2000, or 1000 ng/ml.

[0192] In some embodiments the components of the medium are maintained. In some embodiments, 30% to 99% of the medium is changed at a time interval ranging from 1-2 days, 2-3 days, 3-4 days, 4-5 days, or 5-6 days. In some embodiments, the time interval is 1 day. In some embodiments, the time interval is 2 days. In some embodiments, the time interval is 3 days. In some embodiments, the time interval is 4 days. In some embodiments, the time interval is 5 days. In some embodiments, the time interval is 6 days.

[0193] Also, according to the one step method, TILs can be activated and expanded using a combination of a T cell receptor (TCR) agonist (e.g., an CD3 agonist) and an agonist of a T cell costimulatory molecule (e.g., a CD28 agonist) in the absence of feeder cells. For example, the TCR agonist and CD28 agonist can be antibodies linked to or complexed with each other or linked to nanomatrices.

[0194] In one aspect, the present disclosure provides methods of expanding a population of TILs in a disaggregated tumor sample comprising culturing the disaggregated tumor sample in a culture medium comprising a TCR agonist; an agonist of a T cell costimulatory molecule; and IL-15, thereby expanding the population of TILs. In some embodiments, the culture medium does not comprise IL-2, IL-21, or both IL-2 and IL-21. In some embodiments, the final concentration of IL-15 in the culture medium is greater than 0.5 ng/ml. In some embodiments, the final concentration of IL-15 in the culture medium is greater than 1 ng/ml. In some embodiments, the final concentration of IL-15 in the culture medium is greater than 10 ng/ml. In some embodiments, the final concentration of IL-15 in the culture medium is greater than 100 ng/ml. In some embodiments, the final concentration of IL-15 utilized is less than 10,000 ng/ml, optionally less than 9000, 8000, 7000, 6000, 5000, 4000, 3000, 2000, or 1000 ng/ml.

[0195] In some embodiments, the final concentration of IL-15 in the culture medium is greater than 1 U/ml. In some embodiments, the final concentration of IL-15 in the culture medium is greater than 2 U/ml. In some embodiments, the final concentration of IL-15 in the culture medium is greater than 20 U/ml. In some embodiments, the final concentration of IL-15 in the culture medium is greater than 200 U/ml. In some embodiments, the final concentration of IL-15 utilized is less than 20,000 U/ml, optionally less than 18,000, 16,000, 14,000, 12,000, 10,000, 8000, 6000, 4000, or 2000 U/ml.

[0196] In some embodiments, the medium comprises feeder cells. In some embodiments, the feeder cells are peripheral blood mononuclear cells (PBMCs). In some embodiments, the feeder cells are antigen presenting cells (APCs). In some embodiments, the feeder cells express the T cell receptor (TCR) agonist and/or the CD28 agonist. In some embodiments, the feeder cells express the T cell receptor (TCR) agonist and/or a 4-1BB agonist, as described in Bartkowiak and Curran, Front Oncol, 5:117 (2015), incorporated herein by reference in its entirety. In some embodiments, the 41BB agonist is 41BB ligand. In some embodiments, the T cell receptor (TCR) agonist and/or CD28 are expressed on the surface of the feeder cells. In some embodiments, the feeder cells are genetically modified to express the T cell-stimulating cytokine. In some embodiments, the T-cell agonist is an CD3 agonist. In some embodiments, the CD3 agonist is OKT3 or UCHT. In some embodiments, the T cell-stimulating cytokine that the feeder cells are genetically modified to express is IL-2, IL-7, IL-15, IL-21, and combinations thereof. In some embodiments, the feeder cells are genetically modified to express IL-15, IL-7, or both IL-15 and IL-7. In some embodiments, the medium does not comprise feeder cells.

[0197] In some embodiments, the CD28 agonist is soluble in the medium. In some embodiments, the TCR agonist is a CD3 agonist. In some embodiments, the T-cell agonist is an CD3 agonist. In some embodiments, the CD-3 agonist is OKT3 or UCHT.

[0198] In some embodiments, the TCR agonist comprises a soluble monospecific complex comprising two anti-CD3 antibodies linked together. In some embodiments, the CD28 agonist comprises a soluble monospecific complex comprising two anti-CD28 antibodies linked together.

[0199] In some embodiments, the medium comprises a CD2 agonist. In some embodiments, the CD2 agonist comprises a soluble monospecific complex comprising two anti-CD2 antibodies linked together.

[0200] In some embodiments, the soluble monospecific complexes are at a concentration of 0.2-25 μl/ml. In some embodiments, the soluble monospecific complexes are at a concentration of 0.2-1 μl/ml. In some embodiments, the soluble monospecific complexes are at a concentration of 1-2 μl/ml. In some embodiments, the soluble monospecific complexes are at a concentration of 2-5 μl/ml. In some embodiments, the soluble monospecific complexes are at a concentration of 5-10 μl/ml. In some embodiments, the soluble monospecific complexes are at a concentration of 10-15 μl/ml. In some embodiments, the soluble monospecific complexes are at a concentration of 15-20 μl/ml. In some embodiments, the soluble monospecific complexes are at a concentration of 20-25 μl/ml. In some embodiments, the soluble monospecific complexes are tetrameric antibody complexes (TACs). In some embodiments, each TAC comprises two antibodies from a first animal species bound by two antibody molecules from a second species that specifically bind to the Fc portion of the antibodies from the first animal species. In some embodiments, the anti-CD3 antibody is an OKT3 antibody or an UCHT1 antibody.

[0201] In another aspect, the present disclosure provides methods for expanding a population of TILs comprising culturing the population of TILs in a culture medium comprising IL-15 and a nanomatrix comprising a colloidal suspension of matrices of polymer chains, wherein the matrices are attached to TCR agonists and agonists of a T cell costimulatory molecule, wherein each matrix is 1 to 500 nm in length in its largest dimension and wherein the method does not comprise the use of feeder cells during expansion of the population of TILs.

[0202] In some embodiments, the TCR agonist and/or the CD28 agonist are linked to a nanomatrix comprising a colloidal suspension of matrices of polymer chains, wherein each nanomatrix is 1 to 500 nm in length in its largest dimension. In some embodiments, the nanomatrix is 1 to 50 nm in length in its largest dimension. In some embodiments, the nanomatrix is 50 to 100 nm in length in its largest dimension. In some embodiments, the nanomatrix is 100 to 150 nm in length in its largest dimension. In some embodiments, the nanomatrix is 150 to 200 nm in length in its largest dimension. In some embodiments, the nanomatrix is 200 to 250 nm in length in its largest dimension. In some embodiments, the nanomatrix is 250 to 300 nm in length in its largest dimension. In some embodiments, the nanomatrix is 300 to 350 nm in length in its largest dimension. In some embodiments, the nanomatrix is 350 to 400 nm in length in its largest dimension. In some embodiments, the nanomatrix is 400 to 450 nm in length in its largest dimension. In some embodiments, the nanomatrix is 450 to 500 nm in length in its largest dimension.

[0203] In some embodiments, the TCR agonists and agonists of a T cell costimulatory molecule utilized in the described methods are attached to the same polymer chains. In some embodiments, the TCR agonists and agonists of a T cell costimulatory molecule are attached to different polymer chains. In some embodiments, the TCR agonists are attached to the matrices at 25 μg per mg of matrix. In some embodiments, the agonist of a T cell costimulatory molecule is attached to the matrices at 25 μg per mg of matrix. Typically, the agonists are covalently attached to the polymer chains that comprise the matrices within the nanomatrix.

[0204] In some embodiments, the TCR agonist and the CD28 agonist are attached to the same polymer chains. In some embodiments, the TCR agonist and the CD28 agonist are attached to different polymer chains. In some embodiments, the TCR agonist, or fragment thereof, is attached to the nanomatrix at 25 μg per mg of nanomatrix. In some embodiments, the TCR agonist, or fragment thereof, is attached to the nanomatrix at about 5 μg to about 10 μg per mg of nanomatrix. In some embodiments, the TCR agonist, or fragment thereof, is attached to the nanomatrix at about 10 μg to about 15 μg per mg of nanomatrix. In some embodiments, the TCR agonist, or fragment thereof, is attached to the nanomatrix at about 15 μg to about 20 μg per mg of nanomatrix. In some embodiments, the TCR agonist, or fragment thereof, is attached to the nanomatrix at about 20 μg to about 25 μg per mg of nanomatrix. In some embodiments, the TCR agonist, or fragment thereof, is attached to the nanomatrix at about 25 μg to about 30 μg per mg of nanomatrix. In some embodiments, the TCR agonist, or fragment thereof, is attached to the nanomatrix at about 30 μg to about 35 μg per mg of nanomatrix. In some embodiments, the TCR agonist, or fragment thereof, is attached to the nanomatrix at about 35 μg to about 40 μg per mg of nanomatrix. In some embodiments, the TCR agonist, or fragment thereof, is attached to the nanomatrix at about 40 μg to about 45 μg per mg of nanomatrix. In some embodiments, the TCR agonist, or fragment thereof, is attached to the nanomatrix at about 45 μg to about 50 μg per mg of nanomatrix. In some embodiments, the TCR agonist is a CD3 agonist.

[0205] In some embodiments, the CD28 agonist, or fragment thereof, is attached to the nanomatrix at 25 μg per mg of nanomatrix. In some embodiments, the CD28 agonist, or fragment thereof, is attached to the nanomatrix at about 5 μg to about 10 μg per mg of nanomatrix. In some embodiments, the CD28 agonist, or fragment thereof, is attached to the nanomatrix at about 10 μg to about 15 μg per mg of nanomatrix. In some embodiments, the CD28 agonist, or fragment thereof, is attached to the nanomatrix at about 15 μg to about 20 μg per mg of nanomatrix. In some embodiments, the CD28 agonist, or fragment thereof, is attached to the nanomatrix at about 20 μg to about 25 μg per mg of nanomatrix. In some embodiments, the CD28 agonist, or fragment thereof, is attached to the nanomatrix at about 25 μg to about 30 μg per mg of nanomatrix. In some embodiments, the CD28 agonist, or fragment thereof, is attached to the nanomatrix at about 30 μg to about 35 μg per mg of nanomatrix. In some embodiments, the CD28 agonist, or fragment thereof, is attached to the nanomatrix at about 35 μg to about 40 μg per mg of nanomatrix. In some embodiments, the CD28 agonist, or fragment thereof, is attached to the nanomatrix at about 40 μg to about 45 μg per mg of nanomatrix. In some embodiments, the CD28 agonist, or fragment thereof, is attached to the nanomatrix at about 45 μg to about 50 μg per mg of nanomatrix.

[0206] In some embodiments, the nanomatrix further comprises magnetic, paramagnetic or superparamagnetic nanocrystals embedded among or within the matrices of polymer chains. In some embodiments, the matrix of polymer chains comprises a polymer of dextran. In some embodiments, the polymer chains are colloidal polymer chains.

[0207] In some embodiments, the ratio of volume of nanomatrix to volume of TILs in the disaggregated tumor sample is greater than or equal to 1:5. In some embodiments, the ratio of volume of nanomatrix to volume of TILs is greater than or equal to 1:10. In some embodiments, the ratio of volume of nanomatrix to volume of TILs is greater than or equal to 1:25. In some embodiments, the ratio of volume of nanomatrix to volume of TILs is greater than or equal to 1:50. In some embodiments, the ratio of volume of nanomatrix to volume of TILs is greater than or equal to 1:100. In some embodiments, the ratio of volume of nanomatrix to volume of TILs is greater than or equal to 1:200. In some embodiments, the ratio of volume of nanomatrix to volume of TILs is greater than or equal to 1:300. In some embodiments, the ratio of volume of nanomatrix to volume of TILs is greater than or equal to 1:400. In some embodiments, the ratio of volume of nanomatrix to volume of TILs is greater than or equal to 1:500. In some embodiments, the ratio of volume of nanomatrix to volume of TILs is greater than or equal to 1:600. In some embodiments, the ratio of volume of nanomatrix to volume of TILs is greater than or equal to 1:700. In some embodiments, the ratio of volume of nanomatrix to volume of TILs is greater than or equal to 1:800. In some embodiments, the ratio of volume of nanomatrix to volume of TILs is greater than or equal to 1:900. In some embodiments, the ratio of volume of nanomatrix to volume of TILs is greater than or equal to 1:1,000.

[0208] In some embodiments, the ratio of number of matrices to TILs in the disaggregated tumor sample is greater than or equal to 1:500. In some embodiments, the ratio of number of matrices to TILs is 1:500 to 1:750. In some embodiments, the ratio of number of matrices to TILs is 1:750 to 1:1,000. In some embodiments, the ratio of number of matrices to TILs is 1:1,000 to 1:1,250. In some embodiments, the ratio of number of matrices to TILs is 1:1,250 to 1:1,500. In some embodiments, the ratio of number of matrices to TILs is 1:1,500 to 1:1,750. In some embodiments, the ratio of number of matrices to TILs is 1:1,750 to 1:2,000. In some embodiments, the ratio of number of matrices to TILs is 1:2,000 to 1:2,250. In some embodiments, the ratio of number of matrices to TILs is 1:2,250 to 1:2,500. In some embodiments, the ratio of number of matrices to TILs is 1:2,500 to 1:2,750. In some embodiments, the ratio of number of matrices to TILs is 1:2,750 to 1:3,000. In some embodiments, the ratio of number of matrices to TILs is 1:3,000 to 1:3,500. In some embodiments, the ratio of number of matrices to TILs is 1:3,500 to 1:4,000. In some embodiments, the ratio of number of matrices to TILs is 1:4,000 to 1:5,000.

[0209] In some embodiments, the agonists are recombinant agonists. In some embodiments, the agonists are antibodies. In some embodiments, the antibodies are humanized antibodies. In some embodiments, the CD3 agonist is an OKT3 antibody or an UCHT1 antibody.

[0210] In another aspect of the method disclosed herein, the method for expanding a population of TILs comprises contacting the population of TILs with a nanomatrix comprising a colloidal suspension of matrices of polymer chains, wherein the matrices are attached to CD3 agonists and CD28 agonists, wherein the nanomatrix provides activation signals to the population of TILs, thereby activating and inducing the population of TILs to proliferate, wherein each matrix is 1 to 500 nm in length in its largest dimension, and wherein the method does not comprise the use of feeder cells during expansion of the population of TILs.

[0211] In some embodiments, the population of TILs contacted with the nanomatrix further comprises tumor cells. In some embodiments, the population of TILs is isolated from a subject and contacted with the nanomatrix without an additional expansion process of the population of TILs prior to contacting the population of TILs with the nanomatrix.

[0212] In some embodiments, the CD3 agonists and the CD28 agonists are attached to the same polymer chains. In some embodiments, the CD3 agonists and the CD28 agonists are attached to different polymer chains. In some embodiments, the CD3 agonists, or fragments thereof, are attached to the nanomatrix at 25 μg per mg of nanomatrix. In some embodiments, the CD3 agonists, or fragments thereof, are attached to the nanomatrix at about 5 μg to about 10 μg per mg of nanomatrix. In some embodiments, the CD3 agonists, or fragments thereof, are attached to the nanomatrix at about 10 μg to about 15 μg per mg of nanomatrix. In some embodiments, the CD3 agonists, or fragments thereof, are attached to the nanomatrix at about 15 μg to about 20 μg per mg of nanomatrix. In some embodiments, the CD3 agonists, or fragments thereof, are attached to the nanomatrix at about 20 μg to about 25 μg per mg of nanomatrix. In some embodiments, the CD3 agonists, or fragments thereof, are attached to the nanomatrix at about 25 μg to about 30 μg per mg of nanomatrix. In some embodiments, the CD3 agonists, or fragments thereof, are attached to the nanomatrix at about 30 μg to about 35 μg per mg of nanomatrix. In some embodiments, the CD3 agonists, or fragments thereof, are attached to the nanomatrix at about 35 μg to about 40 μg per mg of nanomatrix. In some embodiments, the CD3 agonists, or fragments thereof, are attached to the nanomatrix at about 40 μg to about 45 μg per mg of nanomatrix. In some embodiments, the CD3 agonists, or fragments thereof, are attached to the nanomatrix at about 45 μg to about 50 μg per mg of nanomatrix.

[0213] In some embodiments, the CD28 agonists, or fragments thereof, are attached to the nanomatrix at 25 μg per mg of nanomatrix. In some embodiments, the CD28 agonists, or fragments thereof, are attached to the nanomatrix at about 5 μg to about 10 μg per mg of nanomatrix. In some embodiments, the CD28 agonists, or fragments thereof, are attached to the nanomatrix at about 10 μg to about 15 μg per mg of nanomatrix. In some embodiments, the CD28 agonists, or fragments thereof, are attached to the nanomatrix at about 15 μg to about 20 μg per mg of nanomatrix. In some embodiments, the CD28 agonists, or fragments thereof, are attached to the nanomatrix at about 20 μg to about 25 μg per mg of nanomatrix. In some embodiments, the CD28 agonists, or fragments thereof, are attached to the nanomatrix at about 25 μg to about 30 μg per mg of nanomatrix. In some embodiments, the CD28 agonists, or fragments thereof, are attached to the nanomatrix at about 30 μg to about 35 μg per mg of nanomatrix. In some embodiments, the CD28 agonists, or fragments thereof, are attached to the nanomatrix at about 35 μg to about 40 μg per mg of nanomatrix. In some embodiments, the CD28 agonists, or fragments thereof, are attached to the nanomatrix at about 40 μg to about 45 μg per mg of nanomatrix. In some embodiments, the CD28 agonists, or fragments thereof, are attached to the nanomatrix at about 45 μg to about 50 μg per mg of nanomatrix.

[0214] In some embodiments, the nanomatrix further comprises magnetic, paramagnetic or superparamagnetic nanocrystals embedded among or within the matrices of polymer chains. In some embodiments, the matrix of polymer chains comprises a polymer of dextran. In some embodiments, the polymer chains are colloidal polymer chains.

[0215] In some embodiments, the ratio of volume of nanomatrix to volume of TILs is greater than or equal to 1:5. In some embodiments, the ratio of volume of nanomatrix to volume of TILs is greater than or equal to 1:10. In some embodiments, the ratio of volume of nanomatrix to volume of TILs is greater than or equal to 1:25. In some embodiments, the ratio of volume of nanomatrix to volume of TILs is greater than or equal to 1:50. In some embodiments, the ratio of volume of nanomatrix to volume of TILs is greater than or equal to 1:100. In some embodiments, the ratio of volume of nanomatrix to volume of TILs is greater than or equal to 1:200. In some embodiments, the ratio of volume of nanomatrix to volume of TILs is greater than or equal to 1:300. In some embodiments, the ratio of volume of nanomatrix to volume of TILs is greater than or equal to 1:400. In some embodiments, the ratio of volume of nanomatrix to volume of TILs is greater than or equal to 1:500. In some embodiments, the ratio of volume of nanomatrix to volume of TILs is greater than or equal to 1:600. In some embodiments, the ratio of volume of nanomatrix to volume of TILs is greater than or equal to 1:700. In some embodiments, the ratio of volume of nanomatrix to volume of TILs is greater than or equal to 1:800. In some embodiments, the ratio of volume of nanomatrix to volume of TILs is greater than or equal to 1:900. In some embodiments, the ratio of volume of nanomatrix to volume of TILs is greater than or equal to 1:1,000.

[0216] In some embodiments, the ratio of number of matrices to TILs is greater than or equal to 1:500. In some embodiments, the ratio of number of matrices to TILs is 1:500 to 1:750. In some embodiments, the ratio of number of matrices to TILs is 1:750 to 1:1,000. In some embodiments, the ratio of number of matrices to TILs is 1:1,000 to 1:1,250. In some embodiments, the ratio of number of matrices to TILs is 1:1,250 to 1:1,500. In some embodiments, the ratio of number of matrices to TILs is 1:1,500 to 1:1,750. In some embodiments, the ratio of number of matrices to TILs is 1:1,750 to 1:2,000. In some embodiments, the ratio of number of matrices to TILs is 1:2,000 to 1:2,250. In some embodiments, the ratio of number of matrices to TILs is 1:2,250 to 1:2,500. In some embodiments, the ratio of number of matrices to TILs is 1:2,500 to 1:2,750. In some embodiments, the ratio of number of matrices to TILs is 1:2,750 to 1:3,000. In some embodiments, the ratio of number of matrices to TILs is 1:3,000 to 1:3,500. In some embodiments, the ratio of number of matrices to TILs is 1:3,500 to 1:4,000. In some embodiments, the ratio of number of matrices to TILs is 1:4,000 to 1:5,000.

[0217] In some embodiments, the agonists are recombinant agonists. In some embodiments, the agonists are antibodies. In some embodiments, the antibodies are humanized antibodies. In some embodiments, the CD3 agonist is an OKT3 antibody or an UCHT1 antibody.

[0218] In another aspect, the present disclosure provides methods for expanding a population of TILs comprising culturing the population of TILs in a culture medium comprising IL-15; and a first soluble monospecific complex comprising an anti-CD3 antibody or fragment thereof, a second soluble monospecific complex comprising an anti-CD28 antibody or fragment thereof, and a third soluble monospecific complex comprising an anti-CD2 antibody or fragment thereof, wherein each soluble monospecific complex comprises two antibodies, or fragments thereof, linked together, and each antibody, or fragments thereof, of each soluble monospecific complex specifically binds to the same antigen on the population of TILs. In some embodiments, the soluble monospecific complexes are at a concentration of 0.2-25 μL/ml. In some embodiments, the need for feeder cells is obviated. In some embodiments, the final concentration of IL-15 in the culture medium is greater than 0.5 ng/ml. In some embodiments, the final concentration of IL-15 in the culture medium is greater than 1 ng/ml. In some embodiments, the final concentration of IL-15 in the culture medium is greater than 10 ng/ml. In some embodiments, the final concentration of IL-15 in the culture medium is greater than 100 ng/ml. In some embodiments, the final concentration of IL-15 utilized is less than 10,000 ng/ml, optionally less than 9000, 8000, 7000, 6000, 5000, 4000, 3000, 2000, or 1000 ng/ml.

[0219] In some embodiments, the final concentration of IL-15 in the culture medium is greater than 1 U/ml. In some embodiments, the final concentration of IL-15 in the culture medium is greater than 2 U/ml. In some embodiments, the final concentration of IL-15 in the culture medium is greater than 20 U/ml. In some embodiments, the final concentration of IL-15 in the culture medium is greater than 200 U/ml. In some embodiments, the final concentration of IL-15 utilized is less than 20,000 U/ml, optionally less than 18,000, 16,000, 14,000, 12,000, 10,000, 8000, 6000, 4000, or 2000 U/ml.

[0220] In another aspect of the method disclosed herein, the method for expanding a population of TILs comprises contacting the population of TILs with a composition comprising a first, a second, and a third soluble monospecific complex, wherein each soluble monospecific complex comprises two antibodies or fragments thereof linked together, wherein each antibody or fragments thereof of each soluble monospecific complex specifically binds to the same antigen on the population of TILs, wherein the first soluble monospecific complex comprises an anti-CD3 antibody, wherein the second soluble monospecific complex comprises an anti-CD28 antibody, and wherein the third soluble monospecific complex comprises an anti-CD2 antibody, and the method does not comprise the use of feeder cells during expansion of the population of TILs.

[0221] In some embodiments, the population of TILs contacted with the composition further comprises tumor cells. In some embodiments, the population of TILs is isolated from a subject and contacted with the composition without an additional expansion process of the population of TILs prior to contacting the population of TILs with the composition.

[0222] In some embodiments, the soluble monospecific complexes are at a concentration of 0.2-25 μl/ml. In some embodiments, the soluble monospecific complexes are at a concentration of 0.2-1 μl/ml. In some embodiments, the soluble monospecific complexes are at a concentration of 1-2 μl/ml. In some embodiments, the soluble monospecific complexes are at a concentration of 2-5 μl/ml. In some embodiments, the soluble monospecific complexes are at a concentration of 5-10 μl/ml. In some embodiments, the soluble monospecific complexes are at a concentration of 10-15 μl/ml. In some embodiments, the soluble monospecific complexes are at a concentration of 15-20 μl/ml. In some embodiments, the soluble monospecific complexes are at a concentration of 20-25 μl/ml. In some embodiments, the soluble monospecific complexes are tetrameric antibody complexes (TACs). In some embodiments, each TAC comprises two antibodies from a first animal species bound by two antibody molecules from a second species that specifically bind to the Fc portion of the antibodies from the first animal species. In some embodiments, the anti-CD3 antibody is an OKT3 antibody or an UCHT1 antibody.

[0223] In some embodiments, the TILs are expanded for up to a total of 9, 10, 11, 12, 13, 14, 15, 16, 17, 18, 19, 20, 21, 22, 23, 24, 25, 26, 27 or 28 days from the initial tumor fragmentation or disaggregation. In some embodiments, the TILs are expanded for a total of 9-25 days, 9-21 days, or 9-14 days. In some embodiments, the TILs are expanded for up to a total of 9 days. In some embodiments, the TILs are expanded for up to a total of 10 days. In some embodiments, the TILs are expanded for up to a total of 11 days. In some embodiments, the TILs are expanded for up to a total of 12 days. In some embodiments, the TILs are expanded for up to a total of 13 days. In some embodiments, the TILs are expanded for up to a total of 14 days. In some embodiments, the TILs are expanded for up to a total of 15 days. In some embodiments, the TILs are expanded for up to a total of 16 days. In some embodiments, the TILs are expanded for up to a total of 17 days. In some embodiments, the TILs are expanded for up to a total of 18 days. In some embodiments, the TILs are expanded for up to a total of 19 days. In some embodiments, the TILs are expanded for up to a total of 20 days. In some embodiments, the TILs are expanded for up to a total of 21 days. In some embodiments, the TILs are expanded for up to a total of 22 days. In some embodiments, the TILs are expanded for up to a total of 23 days. In some embodiments, the TILs are expanded for up to a total of 24 days. In some embodiments, the TILs are expanded for up to a total of 25 days. In some embodiments, the TILs are expanded for up to a total of 26 days. In some embodiments, the TILs are expanded for up to a total of 27 days. In some embodiments, the TILs are expanded for up to a total of 28 days.

[0224] In some embodiments, the population of TILs is expanded 500 to 500,000-fold. In some embodiments, the population of TILs is expanded 500 to 1,000-fold. In some embodiments, the population of TILs is expanded 500 to 4,000-fold. In some embodiments, the population of TILs is expanded 1,000 to 2,500-fold. In some embodiments, the population of TILs is expanded 2,500 to 5,000-fold. In some embodiments, the population of TILs is expanded 5,000 to 10,000-fold. In some embodiments, the population of TILs is expanded 10,000 to 20,000-fold. In some embodiments, the population of TILs is expanded 20,000 to 30,000-fold. In some embodiments, the population of TILs is expanded 30,000 to 40,000-fold. In some embodiments, the population of TILs is expanded 40,000 to 50,000-fold. In some embodiments, the population of TILs is expanded 50,000 to 100,000-fold. In some embodiments, the population of TILs is expanded 100,000 to 150,000-fold. In some embodiments, the population of TILs is expanded 150,000 to 200,000-fold. In some embodiments, the population of TILs is expanded 200,000 to 250,000-fold. In some embodiments, the population of TILs is expanded 250,000 to 300,000-fold. In some embodiments, the population of TILs is expanded 300,000 to 350,000-fold. In some embodiments, the population of TILs is expanded 350,000 to 400,000-fold. In some embodiments, the population of TILs is expanded 400,000 to 450,000-fold. In some embodiments, the population of TILs is expanded 450,000 to 500,000-fold.

[0225] In some embodiments, the population of TILs is expanded from an initial population of TILs of between 100 and 5×10⁷ TILs. In some embodiments, the population of TILs is expanded from an initial population of TILs of between 100 and 1,000 TILs. In some embodiments, the population of TILs is expanded from an initial population of TILs of between 1,000 and 2,500 TILs. In some embodiments, the population of TILs is expanded from an initial population of TILs of between 2,500 and 5,000 TILs. In some embodiments, the population of TILs is expanded from an initial population of TILs of between 5,000 and 7,500 TILs. In some embodiments, the population of TILs is expanded from an initial population of TILs of between 7,500 and 10,000 TILs. In some embodiments, the population of TILs is expanded from an initial population of TILs of between 10,000 and 20,000 TILs. In some embodiments, the population of TILs is expanded from an initial population of TILs of between 20,000 and 30,000 TILs. In some embodiments, the population of TILs is expanded from an initial population of TILs of between 30,000 and 40,000 TILs. In some embodiments, the population of TILs is expanded from an initial population of TILs of between 40,000 and 50,000 TILs. In some embodiments, the population of TILs is expanded from an initial population of TILs of between 50,000 and 60,000 TILs. In some embodiments, the population of TILs is expanded from an initial population of TILs of between 60,000 and 70,000 TILs. In some embodiments, the population of TILs is expanded from an initial population of TILs of between 70,000 and 80,000 TILs. In some embodiments, the population of TILs is expanded from an initial population of TILs of between 80,000 and 90,000 TILs. In some embodiments, the population of TILs is expanded from an initial population of TILs of between 90,000 and 100,000 TILs. In some embodiments, the population of TILs is expanded from an initial population of TILs of between 1×10⁶ and 2×10⁶ TILs. In some embodiments, the population of TILs is expanded from an initial population of TILs of between 2×10⁶ and 3×10⁶ TILs. In some embodiments, the population of TILs is expanded from an initial population of TILs of between 3×10⁶ and 4×10⁶ TILs. In some embodiments, the population of TILs is expanded from an initial population of TILs of between 4×10⁶ and 5×10⁶ TILs. In some embodiments, the population of TILs is expanded from an initial population of TILs of between 5×10⁶ and 6×10⁶ TILs. In some embodiments, the population of TILs is expanded from an initial population of TILs of between 6×10⁶ and 7×10⁶ TILs. In some embodiments, the population of TILs is expanded from an initial population of TILs of between 7×10⁶ and 8×10⁶ TILs. In some embodiments, the population of TILs is expanded from an initial population of TILs of between 8×10⁶ and 9×10⁶ TILs. In some embodiments, the population of TILs is expanded from an initial population of TILs of between 9×10⁶ and 1×10⁷ TILs. In some embodiments, the population of TILs is expanded from an initial population of TILs of between 1×10⁷ and 5×10⁷ TILs.

[0226] In some embodiments, the population of TILs is expanded at least 1,500-fold at day 14 of the expansion. In some embodiments, the population of TILs is expanded at least 5,000-fold at day 14 of the expansion. In some embodiments, the population of TILs is expanded at least 7,500-fold at day 14 of the expansion. In some embodiments, the population of TILs is expanded at least 10,000-fold at day 14 of the expansion. In some embodiments, the population of TILs is expanded at least 15,000-fold at day 14 of the expansion. In some embodiments, the population of TILs is expanded at least 20,000-fold at day 14 of the expansion. In some embodiments, the population of TILs is expanded at least 25,000-fold at day 14 of the expansion. In some embodiments, the population of TILs is expanded at least 30,000-fold at day 14 of the expansion. In some embodiments, the population of TILs is expanded at least 40,000-fold at day 14 of the expansion. In some embodiments, the population of TILs is expanded at least 50,000-fold at day 14 of the expansion. In some embodiments, the population of TILs is expanded at least 60,000-fold at day 14 of the expansion. In some embodiments, the population of TILs is expanded at least 70,000-fold at day 14 of the expansion. In some embodiments, the population of TILs is expanded at least 80,000-fold at day 14 of the expansion. In some embodiments, the population of TILs is expanded at least 90,000-fold at day 14 of the expansion. In some embodiments, the population of TILs is expanded at least 100,000-fold at day 14 of the expansion. In some embodiments, the population of TILs is expanded at least 110,000-fold at day 14 of the expansion. In some embodiments, the population of TILs is expanded at least 120,000-fold at day 14 of the expansion. In some embodiments, the population of TILs is expanded at least 130,000-fold at day 14 of the expansion. In some embodiments, the population of TILs is expanded at least 140,000-fold at day 14 of the expansion. In some embodiments, the population of TILs is expanded at from 1,000-fold to 5,000-fold at day 14 of the expansion. In some embodiments, these fold expansions on day 14 occurred with TILs from pre-REP failures.

[0227] In some embodiments, the population of TILs is expanded at least 150-fold at day 10 of the expansion. In some embodiments, the population of TILs is expanded at least 500-fold at day 10 of the expansion. In some embodiments, the population of TILs is expanded at least 750-fold at day 10 of the expansion. In some embodiments, the population of TILs is expanded at least 1000-fold at day 10 of the expansion. In some embodiments, the population of TILs is expanded at least 1500-fold at day 10 of the expansion. In some embodiments, the population of TILs is expanded at least 2000-fold at day 10 of the expansion. In some embodiments, the population of TILs is expanded at least 2500-fold at day 10 of the expansion. In some embodiments, the population of TILs is expanded at least 3000-fold at day 10 of the expansion. In some embodiments, the population of TILs is expanded at least 4000-fold at day 10 of the expansion. In some embodiments, the population of TILs is expanded at least 5000-fold at day 10 of the expansion. In some embodiments, the population of TILs is expanded at least 6000-fold at day 10 of the expansion. In some embodiments, the population of TILs is expanded at least 7000-fold at day 10 of the expansion. In some embodiments, the population of TILs is expanded at least 8000-fold at day 10 of the expansion. In some embodiments, the population of TILs is expanded at least 9000-fold at day 10 of the expansion. In some embodiments, the population of TILs is expanded at least 10,000-fold at day 10 of the expansion. In some embodiments, these fold expansions on day 10 occurred with TILs from pre-REP failures.

[0228] In some embodiments, the population of TILs is expanded at most 150,000-fold at day 14 of the expansion. In some embodiments, the population of TILs is expanded at most 5,000-fold at day 14 of the expansion. In some embodiments, the population of TILs is expanded at most 7,500-fold at day 14 of the expansion. In some embodiments, the population of TILs is expanded at most 10,000-fold at day 14 of the expansion. In some embodiments, the population of TILs is expanded at most 15,000-fold at day 14 of the expansion. In some embodiments, the population of TILs is expanded at most 20,000-fold at day 14 of the expansion. In some embodiments, the population of TILs is expanded at most 25,000-fold at day 14 of the expansion. In some embodiments, the population of TILs is expanded at most 30,000-fold at day 14 of the expansion. In some embodiments, the population of TILs is expanded at most 40,000-fold at day 14 of the expansion. In some embodiments, the population of TILs is expanded at most 50,000-fold at day 14 of the expansion. In some embodiments, the population of TILs is expanded at most 60,000-fold at day 14 of the expansion. In some embodiments, the population of TILs is expanded at most 70,000-fold at day 14 of the expansion. In some embodiments, the population of TILs is expanded at most 80,000-fold at day 14 of the expansion. In some embodiments, the population of TILs is expanded at most 90,000-fold at day 14 of the expansion. In some embodiments, the population of TILs is expanded at most 100,000-fold at day 14 of the expansion. In some embodiments, the population of TILs is expanded at most 110,000-fold at day 14 of the expansion. In some embodiments, the population of TILs is expanded at most 120,000-fold at day 14 of the expansion. In some embodiments, the population of TILs is expanded at most 130,000-fold at day 14 of the expansion. In some embodiments, the population of TILs is expanded at most 140,000-fold at day 14 of the expansion. In some embodiments, these fold expansions on day 14 occurred with TILs from pre-REP failures.

[0229] In some embodiments, the population of TILs is expanded at least 10,000-fold at day 21 of the expansion. In some embodiments, the population of TILs is expanded at least 15,000-fold at day 21 of the expansion. In some embodiments, the population of TILs is expanded at least 20,000-fold at day 21 of the expansion. In some embodiments, the population of TILs is expanded at least 25,000-fold at day 21 of the expansion. In some embodiments, the population of TILs is expanded at least 30,000-fold at day 21 of the expansion. In some embodiments, the population of TILs is expanded at least 40,000-fold at day 21 of the expansion. In some embodiments, the population of TILs is expanded at least 50,000-fold at day 21 of the expansion. In some embodiments, the population of TILs is expanded at least 60,000-fold at day 21 of the expansion. In some embodiments, the population of TILs is expanded at least 70,000-fold at day 21 of the expansion. In some embodiments, the population of TILs is expanded at least 80,000-fold at day 21 of the expansion. In some embodiments, the population of TILs is expanded at least 90,000-fold at day 21 of the expansion. In some embodiments, the population of TILs is expanded at least 100,000-fold at day 21 of the expansion. In some embodiments, the population of TILs is expanded at least 110,000-fold at day 21 of the expansion. In some embodiments, the population of TILs is expanded at least 120,000-fold at day 21 of the expansion. In some embodiments, the population of TILs is expanded at least 130,000-fold at day 21 of the expansion. In some embodiments, the population of TILs is expanded at least 140,000-fold at day 21 of the expansion. In some embodiments, the population of TILs is expanded at least 150,000-fold at day 21 of the expansion. In some embodiments, the population of TILs is expanded at least 200,000-fold at day 21 of the expansion. In some embodiments, the population of TILs is expanded at least 300,000-fold at day 21 of the expansion. In some embodiments, the population of TILs is expanded at least 400,000-fold at day 21 of the expansion. In some embodiments, these fold expansions on day 21 occurred with TILs from pre-REP failures.

[0230] In some embodiments, the population of TILs is expanded at most 500,000-fold at day 21 of the expansion. In some embodiments, the population of TILs is expanded at most 20,000-fold at day 21 of the expansion. In some embodiments, the population of TILs is expanded at most 25,000-fold at day 21 of the expansion. In some embodiments, the population of TILs is expanded at most 30,000-fold at day 21 of the expansion. In some embodiments, the population of TILs is expanded at most 40,000-fold at day 21 of the expansion. In some embodiments, the population of TILs is expanded at most 50,000-fold at day 21 of the expansion. In some embodiments, the population of TILs is expanded at most 60,000-fold at day 21 of the expansion. In some embodiments, the population of TILs is expanded at most 70,000-fold at day 21 of the expansion. In some embodiments, the population of TILs is expanded at most 80,000-fold at day 21 of the expansion. In some embodiments, the population of TILs is expanded at most 90,000-fold at day 21 of the expansion. In some embodiments, the population of TILs is expanded at most 100,000-fold at day 21 of the expansion. In some embodiments, the population of TILs is expanded at most 110,000-fold at day 21 of the expansion. In some embodiments, the population of TILs is expanded at most 120,000-fold at day 21 of the expansion. In some embodiments, the population of TILs is expanded at most 130,000-fold at day 21 of the expansion. In some embodiments, the population of TILs is expanded at most 140,000-fold at day 21 of the expansion. In some embodiments, the population of TILs is expanded at most 150,000-fold at day 21 of the expansion. In some embodiments, the population of TILs is expanded at most 200,000-fold at day 21 of the expansion. In some embodiments, the population of TILs is expanded at most 300,000-fold at day 21 of the expansion. In some embodiments, the population of TILs is expanded at most 400,000-fold at day 21 of the expansion. In some embodiments, these fold expansions on day 21 occurred with TILs from pre-REP failures.

[0231] In some embodiments, members of the population of TILs are genetically modified. In some embodiments, the population of TILs is genetically modified using an RNA-guided nuclease. In some embodiments, the population of TILs is genetically modified using Cas9 and at least one guide RNA. In some embodiments, members of the population of TILs are epigenetically modified. Various embodiments of genetically modified TILs are provided below.

[0232] In some embodiments, the population of TILs is expanded to produce an expanded population of TILs, wherein at least 2% of the expanded population have a central memory T cell phenotype. In some embodiments, the population of TILs is expanded to produce an expanded population of TILs, wherein at least 3% of the expanded population have a central memory T cell phenotype. In some embodiments, the population of TILs is expanded to produce an expanded population of TILs, wherein at least 4% of the expanded population have a central memory T cell phenotype. In some embodiments, the population of TILs is expanded to produce an expanded population of TILs, wherein at least 5% of the expanded population have a central memory T cell phenotype. In some embodiments, the population of TILs is expanded to produce an expanded population of TILs, wherein at least 6% of the expanded population have a central memory T cell phenotype. In some embodiments, the population of TILs is expanded to produce an expanded population of TILs, wherein at least 7% of the expanded population have a central memory T cell phenotype. In some embodiments, the population of TILs is expanded to produce an expanded population of TILs, wherein at least 8% of the expanded population have a central memory T cell phenotype. In some embodiments, the population of TILs is expanded to produce an expanded population of TILs, wherein at least 9% of the expanded population have a central memory T cell phenotype. In some embodiments, the population of TILs is expanded to produce an expanded population of TILs, wherein at least 10% of the expanded population have a central memory T cell phenotype. In some embodiments, the population of TILs is expanded to produce an expanded population of TILs, wherein at least 11% of the expanded population have a central memory T cell phenotype. In some embodiments, the population of TILs is expanded to produce an expanded population of TILs, wherein at least 12% of the expanded population have a central memory T cell phenotype. In some embodiments, the population of TILs is expanded to produce an expanded population of TILs, wherein at least 13% of the expanded population have a central memory T cell phenotype. In some embodiments, the population of TILs is expanded to produce an expanded population of TILs, wherein at least 14% of the expanded population have a central memory T cell phenotype. In some embodiments, the population of TILs is expanded to produce an expanded population of TILs, wherein at least 15% of the expanded population have a central memory T cell phenotype. In some embodiments, the population of TILs is expanded to produce an expanded population of TILs, wherein less than 10% of the expanded population have a central memory T cell phenotype.

[0233] In some embodiments, the population of TILs is expanded to produce an expanded population of TILs, wherein 5 to 50% of the expanded population have a central memory T cell phenotype at day 14 of expansion. In some embodiments, the population of TILs is expanded to produce an expanded population of TILs, wherein 10 to 25% of the expanded population have a central memory T cell phenotype at day 14 of expansion. In some embodiments, the population of TILs is expanded to produce an expanded population of TILs, wherein 5 to 10% of the expanded population have a central memory T cell phenotype at day 14 of expansion. In some embodiments, the population of TILs is expanded to produce an expanded population of TILs, wherein 10 to 15% of the expanded population have a central memory T cell phenotype at day 14 of expansion. In some embodiments, the population of TILs is expanded to produce an expanded population of TILs, wherein 15 to 20% of the expanded population have a central memory T cell phenotype at day 14 of expansion. In some embodiments, the population of TILs is expanded to produce an expanded population of TILs, wherein 20 to 25% of the expanded population have a central memory T cell phenotype at day 14 of expansion. In some embodiments, the population of TILs is expanded to produce an expanded population of TILs, wherein 25 to 30% of the expanded population have a central memory T cell phenotype at day 14 of expansion. In some embodiments, the population of TILs is expanded to produce an expanded population of TILs, wherein 30 to 35% of the expanded population have a central memory T cell phenotype at day 14 of expansion. In some embodiments, the population of TILs is expanded to produce an expanded population of TILs, wherein 35 to 40% of the expanded population have a central memory T cell phenotype at day 14 of expansion. In some embodiments, the population of TILs is expanded to produce an expanded population of TILs, wherein 40 to 45% of the expanded population have a central memory T cell phenotype at day 14 of expansion. In some embodiments, the population of TILs is expanded to produce an expanded population of TILs, wherein 45 to 50% of the expanded population have a central memory T cell phenotype at day 14 of expansion.

[0234] In some embodiments, the population of TILs is expanded to produce an expanded population of TILs that have an increase in abundance of CD8+ cells. In some embodiments, the population of TILs is enriched 10% after expansion compared to the starting population of TILs. In some embodiments, the population of TILs is enriched 20% after expansion compared to the starting population of TILs. In some embodiments, the population of TILs is enriched 30% after expansion compared to the starting population of TILs. In some embodiments, the population of TILs is enriched 40% after expansion compared to the starting population of TILs. In some embodiments, the population of TILs is enriched 50% after expansion compared to the starting population of TILs. In some embodiments, the population of TILs is enriched 60% after expansion compared to the starting population of TILs. In some embodiments, the population of TILs is enriched 70% after expansion compared to the starting population of TILs. In some embodiments, the population of TILs is enriched 80% after expansion compared to the starting population of TILs. In some embodiments, the population of TILs is enriched 90% after expansion compared to the starting population of TILs. In some embodiments, the population of TILs is enriched 100% after expansion compared to the starting population of TILs.

[0235] In another aspect, the invention disclosed herein is directed to a composition comprising an expanded population of TILs produced by any of the methods disclosed herein.

### Phenotypic Characteristics of Expanded TILs

[0236] In some cases, the expanded TILs are analyzed for expression of numerous phenotype markers, including those described herein. In some cases, the marker is selected from: TCRα/β, CD57, CD28, CD4, CD27, CD56, CD8a, CD45RA, CD45RO, CD8a, CCR7, CD4, CD3, CD38, and HLA-DR. In some cases, expression of one or more regulatory markers is measured, namely from the group: CD137, CD8a, Lag3, CD4, CD3, PD-1, TIM-3, CD69, CD8a, TIGIT, CD4, CD3, KLRG1, and CD154.

[0237] In some cases, the memory marker is CCR7 or CD62L. In some cases, re-stimulated TILs can also be evaluated for cytokine release, using cytokine release assays. In some cases, TILs can be evaluated for interferon-gamma (IFN-gamma) secretion in response to stimulation either with OKT3 or co-culture with autologous tumor digest.

[0238] In some cases, TILs are evaluated for various regulatory markers, such as TCRα/β, CD56, CD27, CD28, CD57, CD45RA, CD45RO, CD25, CD127, CD95, IL-2R, CCR7, CD62L, KLRG1, and CD122.

### T-Cell Stimulating Cytokines

[0239] The T-cell stimulating cytokine can be any cytokine effective in stimulating T-cells. In some embodiments, the T cell-stimulating cytokine is IL-2, IL-7, IL-15 and/or IL-21.

[0240] In some embodiments, the methods disclosed herein comprise contacting the disaggregated tumor sample and/or population of TILs with the cytokine IL-15. In some embodiments, the TILs are contacted with the cytokine IL-15 every other day. In some embodiments, the TILs are contacted with the cytokine IL-15 in time intervals of 2, 3, 4, 5, or 6 days. In some embodiments, the TILs are contacted with the cytokine IL-15 in a time interval of 2 days. In some embodiments, the TILs are contacted with the cytokine IL-15 in a time interval of 3 days. In some embodiments, the TILs are contacted with the cytokine IL-15 in a time interval of 4 days. In some embodiments, the TILs are contacted with the cytokine IL-15 in a time interval of 5 days. In some embodiments, the TILs are contacted with the cytokine IL-15 in a time interval of 6 days.

[0241] Concentrations of T-cell stimulating cytokines are expressed either as ng/ml or U (“units”)/ml, herein. The terms International Units (IU) and units are used interchangeably, herein. Conversion of units between ng/ml and U/ml can vary based on the cytokine used or even the source of a given cytokine. In some embodiments, 2 U/ml of T-cell stimulating cytokine would be the equivalent of 1 ng/ml of T-cell stimulating cytokine. Thus, 20 U/ml of T-cell stimulating cytokine would be the equivalent of 10 ng/ml of T-cell stimulating cytokine, etc. In some embodiments, about 2 U/ml of T-cell stimulating cytokine would be the equivalent of about 1 ng/ml of T-cell stimulating cytokine. As provided above, in some embodiments, the T cell-stimulating cytokine is IL-2, IL-7, IL-15 and/or IL-21. In some embodiments, the conversion provided herein can vary by up to 20% more or less. For example, in some embodiments, 1 unit/ml is the equivalent of 1.6 mg/ml-2.4 mg/ml. In some embodiments, the conversion provided herein can vary by up to 10% more or less. For example, in some embodiments, 1 unit/ml is the equivalent of 1.8 mg/ml-2.2 mg/ml.

[0242] In some embodiments, the final concentration of the cytokine IL-15 in the cell culture media in the cell culture media is 0.5 ng/ml to 10,000 ng/ml. In some embodiments, the final concentration of the cytokine IL-15 in the cell culture media is 10 ng/ml to 10,000 ng/ml. In some embodiments, the final concentration of the cytokine IL-15 in the cell culture media is 0.5 ng/ml to 10 ng/ml. In some embodiments, the final concentration of the cytokine IL-15 in the cell culture media is 10 ng/ml to 25 ng/ml. In some embodiments, the final concentration of the cytokine IL-15 in the cell culture media is 25 ng/ml to 50 ng/ml. In some embodiments, the final concentration of the cytokine IL-15 in the cell culture media is 50 ng/ml to 75 ng/ml. In some embodiments, the final concentration of the cytokine IL-15 in the cell culture media is 75 ng/ml to 100 ng/ml. In some embodiments, the final concentration of the cytokine IL-15 in the cell culture media is 100 ng/ml to 200 ng/ml. In some embodiments, the final concentration of the cytokine IL-15 in the cell culture media is 200 ng/ml to 300 ng/ml. In some embodiments, the final concentration of the cytokine IL-15 in the cell culture media is 300 ng/ml to 400 ng/ml. In some embodiments, the final concentration of the cytokine IL-15 in the cell culture media is 400 ng/ml to 500 ng/ml. In some embodiments, the final concentration of the cytokine IL-15 in the cell culture media is 500 ng/ml to 600 ng/ml. In some embodiments, the final concentration of the cytokine IL-15 in the cell culture media is 600 ng/ml to 700 ng/ml. In some embodiments, the final concentration of the cytokine IL-15 in the cell culture media is 700 ng/ml to 800 ng/ml. In some embodiments, the final concentration of the cytokine IL-15 in the cell culture media is 800 ng/ml to 900 ng/ml. In some embodiments, the final concentration of the cytokine IL-15 in the cell culture media is 900 ng/ml to 1000 ng/ml. In some embodiments, the final concentration of the cytokine IL-15 in the cell culture media is 1,000 ng/ml to 1,500 ng/ml. In some embodiments, the final concentration of the cytokine IL-15 in the cell culture media is 1,500 ng/ml to 2,000 ng/ml. In some embodiments, the final concentration of the cytokine IL-15 in the cell culture media is 2,000 ng/ml to 2,500 ng/ml. In some embodiments, the final concentration of the cytokine IL-15 in the cell culture media is 2,500 ng/ml to 3,000 ng/ml. In some embodiments, the final concentration of the cytokine IL-15 in the cell culture media is 3,000 ng/ml to 3,500 ng/ml. In some embodiments, the final concentration of the cytokine IL-15 in the cell culture media is 3,500 ng/ml to 4,000 ng/ml. In some embodiments, the final concentration of the cytokine IL-15 in the cell culture media is 4,000 ng/ml to 4,500 ng/ml. In some embodiments, the final concentration of the cytokine IL-15 in the cell culture media is 4,500 ng/ml to 5,000 ng/ml. In some embodiments, the final concentration of the cytokine IL-15 in the cell culture media is 5,000 ng/ml to 5,500 ng/ml. In some embodiments, the final concentration of the cytokine IL-15 in the cell culture media is 5,500 ng/ml to 6,000 ng/ml. In some embodiments, the final concentration of the cytokine IL-15 in the cell culture media is 6,000 ng/ml to 6,500 ng/ml. In some embodiments, the final concentration of the cytokine IL-15 in the cell culture media is 6,500 ng/ml to 7,000 ng/ml. In some embodiments, the final concentration of the cytokine IL-15 in the cell culture media is 7,000 ng/ml to 7,500 ng/ml. In some embodiments, the final concentration of the cytokine IL-15 in the cell culture media is 7,500 ng/ml to 8,000 ng/ml. In some embodiments, the final concentration of the cytokine IL-15 in the cell culture media is 8,000 ng/ml to 8,500 ng/ml. In some embodiments, the final concentration of the cytokine IL-15 in the cell culture media is 8,500 ng/ml to 9,000 ng/ml. In some embodiments, the final concentration of the cytokine IL-15 in the cell culture media is 9,000 ng/ml to 9,500 ng/ml. In some embodiments, the final concentration of the cytokine IL-15 in the cell culture media is 9,500 ng/ml to 10,000 ng/ml.

[0243] In some embodiments, the final concentration of the cytokine IL-15 in the cell culture media in the cell culture media is 1 U/ml to 20,000 U/ml. In some embodiments, the final concentration of the cytokine IL-15 in the cell culture media is 2 U/ml to 20,000 U/ml. In some embodiments, the final concentration of the cytokine IL-15 in the cell culture media is 20 U/ml to 20,000 U/ml. In some embodiments, the final concentration of the cytokine IL-15 in the cell culture media is 2 U/ml to 20 U/ml. In some embodiments, the final concentration of the cytokine IL-15 in the cell culture media is 20 U/ml to 50 U/ml. In some embodiments, the final concentration of the cytokine IL-15 in the cell culture media is 50 U/ml to 100 U/ml. In some embodiments, the final concentration of the cytokine IL-15 in the cell culture media is 100 U/ml to 150 U/ml. In some embodiments, the final concentration of the cytokine IL-15 in the cell culture media is 150 U/ml to 200 U/ml. In some embodiments, the final concentration of the cytokine IL-15 in the cell culture media is 200 U/ml to 400 U/ml. In some embodiments, the final concentration of the cytokine IL-15 in the cell culture media is 400 U/ml to 600 U/ml. In some embodiments, the final concentration of the cytokine IL-15 in the cell culture media is 600 U/ml to 800 U/ml. In some embodiments, the final concentration of the cytokine IL-15 in the cell culture media is 800 U/ml to 1000 U/ml. In some embodiments, the final concentration of the cytokine IL-15 in the cell culture media is 1000 U/ml to 1200 U/ml. In some embodiments, the final concentration of the cytokine IL-15 in the cell culture media is 1200 U/ml to 1400 U/ml. In some embodiments, the final concentration of the cytokine IL-15 in the cell culture media is 1400 U/ml to 1600 U/ml. In some embodiments, the final concentration of the cytokine IL-15 in the cell culture media is 1600 U/ml to 1800 U/ml. In some embodiments, the final concentration of the cytokine IL-15 in the cell culture media is 1800 U/ml to 2000 U/ml. In some embodiments, the final concentration of the cytokine IL-15 in the cell culture media is 2000 U/ml to 3000 U/ml. In some embodiments, the final concentration of the cytokine IL-15 in the cell culture media is 3000 U/ml to 4000 U/ml. In some embodiments, the final concentration of the cytokine IL-15 in the cell culture media is 4000 U/ml to 5000 U/ml. In some embodiments, the final concentration of the cytokine IL-15 in the cell culture media is 5000 U/ml to 6000 U/ml. In some embodiments, the final concentration of the cytokine IL-15 in the cell culture media is 6000 U/ml to 7000 U/ml. In some embodiments, the final concentration of the cytokine IL-15 in the cell culture media is 7000 U/ml to 8000 U/ml. In some embodiments, the final concentration of the cytokine IL-15 in the cell culture media is 8000 U/ml to 9000 U/ml. In some embodiments, the final concentration of the cytokine IL-15 in the cell culture media is 9000 U/ml to 10,000 U/ml. In some embodiments, the final concentration of the cytokine IL-15 in the cell culture media is 10,000 U/ml to 11,000 U/ml. In some embodiments, the final concentration of the cytokine IL-15 in the cell culture media is 11,000 U/ml to 12,000 U/ml. In some embodiments, the final concentration of the cytokine IL-15 in the cell culture media is 12,000 U/ml to 13,000 U/ml. In some embodiments, the final concentration of the cytokine IL-15 in the cell culture media is 13,000 U/ml to 14,000 U/ml. In some embodiments, the final concentration of the cytokine IL-15 in the cell culture media is 14,000 U/ml to 15,000 U/ml. In some embodiments, the final concentration of the cytokine IL-15 in the cell culture media is 15,000 U/ml to 16,000 U/ml. In some embodiments, the final concentration of the cytokine IL-15 in the cell culture media is 16,000 U/ml to 17,000 U/ml. In some embodiments, the final concentration of the cytokine IL-15 in the cell culture media is 17,000 U/ml to 18,000 U/ml. In some embodiments, the final concentration of the cytokine IL-15 in the cell culture media is 18,000 U/ml to 19,000 U/ml. In some embodiments, the final concentration of the cytokine IL-15 in the cell culture media is 19,000 U/ml to 20,000 U/ml.

[0244] In some embodiments, the methods disclosed herein comprise contacting the disaggregated tumor sample and/or population of TILs with the cytokine IL-7. In some embodiments, the TILs are contacted with the cytokine IL-7 every other day. In some embodiments, the TILs are contacted with the cytokine IL-7 in time intervals of 2, 3, 4, 5, or 6 days. In some embodiments, the TILs are contacted with the cytokine IL-7 in a time interval of 2 days. In some embodiments, the TILs are contacted with the cytokine IL-7 in a time interval of 3 days. In some embodiments, the TILs are contacted with the cytokine IL-7 in a time interval of 4 days. In some embodiments, the TILs are contacted with the cytokine IL-7 in a time interval of 5 days. In some embodiments, the TILs are contacted with the cytokine IL-7 in a time interval of 6 days.

[0245] In some embodiments, the final concentration of the cytokine IL-7 in the cell culture media in the cell culture media is 0.5 ng/ml to 10,000 ng/ml. In some embodiments, the final concentration of the cytokine IL-7 in the cell culture media is 10 ng/ml to 10,000 ng/ml. In some embodiments, the final concentration of the cytokine IL-7 in the cell culture media is 0.5 ng/ml to 10 ng/ml. In some embodiments, the final concentration of the cytokine IL-7 in the cell culture media is 10 ng/ml to 25 ng/ml. In some embodiments, the final concentration of the cytokine IL-7 in the cell culture media is 25 ng/ml to 50 ng/ml. In some embodiments, the final concentration of the cytokine IL-7 in the cell culture media is 50 ng/ml to 75 ng/ml. In some embodiments, the final concentration of the cytokine IL-7 in the cell culture media is 75 ng/ml to 100 ng/ml. In some embodiments, the final concentration of the cytokine IL-7 in the cell culture media is 100 ng/ml to 200 ng/ml. In some embodiments, the final concentration of the cytokine IL-7 in the cell culture media is 200 ng/ml to 300 ng/ml. In some embodiments, the final concentration of the cytokine IL-7 in the cell culture media is 300 ng/ml to 400 ng/ml. In some embodiments, the final concentration of the cytokine IL-7 in the cell culture media is 400 ng/ml to 500 ng/ml. In some embodiments, the final concentration of the cytokine IL-7 in the cell culture media is 500 ng/ml to 600 ng/ml. In some embodiments, the final concentration of the cytokine IL-7 in the cell culture media is 600 ng/ml to 700 ng/ml. In some embodiments, the final concentration of the cytokine IL-7 in the cell culture media is 700 ng/ml to 800 ng/ml. In some embodiments, the final concentration of the cytokine IL-7 in the cell culture media is 800 ng/ml to 900 ng/ml. In some embodiments, the final concentration of the cytokine IL-7 in the cell culture media is 900 ng/ml to 1000 ng/ml. In some embodiments, the final concentration of the cytokine IL-7 in the cell culture media is 1,000 ng/ml to 1,500 ng/ml. In some embodiments, the final concentration of the cytokine IL-7 in the cell culture media is 1,500 ng/ml to 2,000 ng/ml. In some embodiments, the final concentration of the cytokine IL-7 in the cell culture media is 2,000 ng/ml to 2,500 ng/ml. In some embodiments, the final concentration of the cytokine IL-7 in the cell culture media is 2,500 ng/ml to 3,000 ng/ml. In some embodiments, the final concentration of the cytokine IL-7 in the cell culture media is 3,000 ng/ml to 3,500 ng/ml. In some embodiments, the final concentration of the cytokine IL-7 in the cell culture media is 3,500 ng/ml to 4,000 ng/ml. In some embodiments, the final concentration of the cytokine IL-7 in the cell culture media is 4,000 ng/ml to 4,500 ng/ml. In some embodiments, the final concentration of the cytokine IL-7 in the cell culture media is 4,500 ng/ml to 5,000 ng/ml. In some embodiments, the final concentration of the cytokine IL-7 in the cell culture media is 5,000 ng/ml to 5,500 ng/ml. In some embodiments, the final concentration of the cytokine IL-7 in the cell culture media is 5,500 ng/ml to 6,000 ng/ml. In some embodiments, the final concentration of the cytokine IL-7 in the cell culture media is 6,000 ng/ml to 6,500 ng/ml. In some embodiments, the final concentration of the cytokine IL-7 in the cell culture media is 6,500 ng/ml to 7,000 ng/ml. In some embodiments, the final concentration of the cytokine IL-7 in the cell culture media is 7,000 ng/ml to 7,500 ng/ml. In some embodiments, the final concentration of the cytokine IL-7 in the cell culture media is 7,500 ng/ml to 8,000 ng/ml. In some embodiments, the final concentration of the cytokine IL-7 in the cell culture media is 8,000 ng/ml to 8,500 ng/ml. In some embodiments, the final concentration of the cytokine IL-7 in the cell culture media is 8,500 ng/ml to 9,000 ng/ml. In some embodiments, the final concentration of the cytokine IL-7 in the cell culture media is 9,000 ng/ml to 9,500 ng/ml. In some embodiments, the final concentration of the cytokine IL-7 in the cell culture media is 9,500 ng/ml to 10,000 ng/ml.

[0246] In some embodiments, the final concentration of the cytokine IL-7 in the cell culture media in the cell culture media is 1 U/ml to 20,000 U/ml. In some embodiments, the final concentration of the cytokine IL-7 in the cell culture media is 2 U/ml to 20,000 U/ml. In some embodiments, the final concentration of the cytokine IL-7 in the cell culture media is 20 U/ml to 20,000 U/ml. In some embodiments, the final concentration of the cytokine IL-7 in the cell culture media is 2 U/ml to 20 U/ml. In some embodiments, the final concentration of the cytokine IL-7 in the cell culture media is 20 U/ml to 50 U/ml. In some embodiments, the final concentration of the cytokine IL-7 in the cell culture media is 50 U/ml to 100 U/ml. In some embodiments, the final concentration of the cytokine IL-7 in the cell culture media is 100 U/ml to 150 U/ml. In some embodiments, the final concentration of the cytokine IL-7 in the cell culture media is 150 U/ml to 200 U/ml. In some embodiments, the final concentration of the cytokine IL-7 in the cell culture media is 200 U/ml to 400 U/ml. In some embodiments, the final concentration of the cytokine IL-7 in the cell culture media is 400 U/ml to 600 U/ml. In some embodiments, the final concentration of the cytokine IL-7 in the cell culture media is 600 U/ml to 800 U/ml. In some embodiments, the final concentration of the cytokine IL-7 in the cell culture media is 800 U/ml to 1000 U/ml. In some embodiments, the final concentration of the cytokine IL-7 in the cell culture media is 1000 U/ml to 1200 U/ml. In some embodiments, the final concentration of the cytokine IL-7 in the cell culture media is 1200 U/ml to 1400 U/ml. In some embodiments, the final concentration of the cytokine IL-7 in the cell culture media is 1400 U/ml to 1600 U/ml. In some embodiments, the final concentration of the cytokine IL-7 in the cell culture media is 1600 U/ml to 1800 U/ml. In some embodiments, the final concentration of the cytokine IL-7 in the cell culture media is 1800 U/ml to 2000 U/ml. In some embodiments, the final concentration of the cytokine IL-7 in the cell culture media is 2000 U/ml to 3000 U/ml. In some embodiments, the final concentration of the cytokine IL-7 in the cell culture media is 3000 U/ml to 4000 U/ml. In some embodiments, the final concentration of the cytokine IL-7 in the cell culture media is 4000 U/ml to 5000 U/ml. In some embodiments, the final concentration of the cytokine IL-7 in the cell culture media is 5000 U/ml to 6000 U/ml. In some embodiments, the final concentration of the cytokine IL-7 in the cell culture media is 6000 U/ml to 7000 U/ml. In some embodiments, the final concentration of the cytokine IL-7 in the cell culture media is 7000 U/ml to 8000 U/ml. In some embodiments, the final concentration of the cytokine IL-7 in the cell culture media is 8000 U/ml to 9000 U/ml. In some embodiments, the final concentration of the cytokine IL-7 in the cell culture media is 9000 U/ml to 10,000 U/ml. In some embodiments, the final concentration of the cytokine IL-7 in the cell culture media is 10,000 U/ml to 11,000 U/ml. In some embodiments, the final concentration of the cytokine IL-7 in the cell culture media is 11,000 U/ml to 12,000 U/ml. In some embodiments, the final concentration of the cytokine IL-7 in the cell culture media is 12,000 U/ml to 13,000 U/ml. In some embodiments, the final concentration of the cytokine IL-7 in the cell culture media is 13,000 U/ml to 14,000 U/ml. In some embodiments, the final concentration of the cytokine IL-7 in the cell culture media is 14,000 U/ml to 15,000 U/ml. In some embodiments, the final concentration of the cytokine IL-7 in the cell culture media is 15,000 U/ml to 16,000 U/ml. In some embodiments, the final concentration of the cytokine IL-7 in the cell culture media is 16,000 U/ml to 17,000 U/ml. In some embodiments, the final concentration of the cytokine IL-7 in the cell culture media is 17,000 U/ml to 18,000 U/ml. In some embodiments, the final concentration of the cytokine IL-7 in the cell culture media is 18,000 U/ml to 19,000 U/ml. In some embodiments, the final concentration of the cytokine IL-7 in the cell culture media is 19,000 U/ml to 20,000 U/ml.

[0247] In some embodiments, the methods disclosed herein comprise contacting the disaggregated tumor sample and/or population of TILs with the cytokine IL-21. In some embodiments, the TILs are contacted with the cytokine IL-21 every other day. In some embodiments, the TILs are contacted with the cytokine IL-21 in time intervals of 2, 3, 4, 5, or 6 days. In some embodiments, the TILs are contacted with the cytokine IL-21 in a time interval of 2 days. In some embodiments, the TILs are contacted with the cytokine IL-21 in a time interval of 3 days. In some embodiments, the TILs are contacted with the cytokine IL-21 in a time interval of 4 days. In some embodiments, the TILs are contacted with the cytokine IL-21 in a time interval of 5 days. In some embodiments, the TILs are contacted with the cytokine IL-21 in a time interval of 6 days.

[0248] In some embodiments, the final concentration of the cytokine IL-21 in the cell culture media in the cell culture media is 0.5 ng/ml to 10,000 ng/ml. In some embodiments, the final concentration of the cytokine IL-21 in the cell culture media is 10 ng/ml to 10,000 ng/ml. In some embodiments, the final concentration of the cytokine IL-21 in the cell culture media is 0.5 ng/ml to 10 ng/ml. In some embodiments, the final concentration of the cytokine IL-21 in the cell culture media is 10 ng/ml to 25 ng/ml. In some embodiments, the final concentration of the cytokine IL-21 in the cell culture media is 25 ng/ml to 50 ng/ml. In some embodiments, the final concentration of the cytokine IL-21 in the cell culture media is 50 ng/ml to 75 ng/ml. In some embodiments, the final concentration of the cytokine IL-21 in the cell culture media is 75 ng/ml to 100 ng/ml. In some embodiments, the final concentration of the cytokine IL-21 in the cell culture media is 100 ng/ml to 200 ng/ml. In some embodiments, the final concentration of the cytokine IL-21 in the cell culture media is 200 ng/ml to 300 ng/ml. In some embodiments, the final concentration of the cytokine IL-21 in the cell culture media is 300 ng/ml to 400 ng/ml. In some embodiments, the final concentration of the cytokine IL-21 in the cell culture media is 400 ng/ml to 500 ng/ml. In some embodiments, the final concentration of the cytokine IL-21 in the cell culture media is 500 ng/ml to 600 ng/ml. In some embodiments, the final concentration of the cytokine IL-21 in the cell culture media is 600 ng/ml to 700 ng/ml. In some embodiments, the final concentration of the cytokine IL-21 in the cell culture media is 700 ng/ml to 800 ng/ml. In some embodiments, the final concentration of the cytokine IL-21 in the cell culture media is 800 ng/ml to 900 ng/ml. In some embodiments, the final concentration of the cytokine IL-21 in the cell culture media is 900 ng/ml to 1000 ng/ml. In some embodiments, the final concentration of the cytokine IL-21 in the cell culture media is 1,000 ng/ml to 1,500 ng/ml. In some embodiments, the final concentration of the cytokine IL-21 in the cell culture media is 1,500 ng/ml to 2,000 ng/ml. In some embodiments, the final concentration of the cytokine IL-21 in the cell culture media is 2,000 ng/ml to 2,500 ng/ml. In some embodiments, the final concentration of the cytokine IL-21 in the cell culture media is 2,500 ng/ml to 3,000 ng/ml. In some embodiments, the final concentration of the cytokine IL-21 in the cell culture media is 3,000 ng/ml to 3,500 ng/ml. In some embodiments, the final concentration of the cytokine IL-21 in the cell culture media is 3,500 ng/ml to 4,000 ng/ml. In some embodiments, the final concentration of the cytokine IL-21 in the cell culture media is 4,000 ng/ml to 4,500 ng/ml. In some embodiments, the final concentration of the cytokine IL-21 in the cell culture media is 4,500 ng/ml to 5,000 ng/ml. In some embodiments, the final concentration of the cytokine IL-21 in the cell culture media is 5,000 ng/ml to 5,500 ng/ml. In some embodiments, the final concentration of the cytokine IL-21 in the cell culture media is 5,500 ng/ml to 6,000 ng/ml. In some embodiments, the final concentration of the cytokine IL-21 in the cell culture media is 6,000 ng/ml to 6,500 ng/ml. In some embodiments, the final concentration of the cytokine IL-21 in the cell culture media is 6,500 ng/ml to 7,000 ng/ml. In some embodiments, the final concentration of the cytokine IL-21 in the cell culture media is 7,000 ng/ml to 7,500 ng/ml. In some embodiments, the final concentration of the cytokine IL-21 in the cell culture media is 7,500 ng/ml to 8,000 ng/ml. In some embodiments, the final concentration of the cytokine IL-21 in the cell culture media is 8,000 ng/ml to 8,500 ng/ml. In some embodiments, the final concentration of the cytokine IL-21 in the cell culture media is 8,500 ng/ml to 9,000 ng/ml. In some embodiments, the final concentration of the cytokine IL-21 in the cell culture media is 9,000 ng/ml to 9,500 ng/ml. In some embodiments, the final concentration of the cytokine IL-21 in the cell culture media is 9,500 ng/ml to 10,000 ng/ml.

[0249] In some embodiments, the final concentration of the cytokine IL-21 in the cell culture media in the cell culture media is 1 U/ml to 20,000 U/ml. In some embodiments, the final concentration of the cytokine IL-21 in the cell culture media is 2 U/ml to 20,000 U/ml. In some embodiments, the final concentration of the cytokine IL-21 in the cell culture media is 20 U/ml to 20,000 U/ml. In some embodiments, the final concentration of the cytokine IL-21 in the cell culture media is 2 U/ml to 20 U/ml. In some embodiments, the final concentration of the cytokine IL-21 in the cell culture media is 20 U/ml to 50 U/ml. In some embodiments, the final concentration of the cytokine IL-21 in the cell culture media is 50 U/ml to 100 U/ml. In some embodiments, the final concentration of the cytokine IL-21 in the cell culture media is 100 U/ml to 150 U/ml. In some embodiments, the final concentration of the cytokine IL-21 in the cell culture media is 150 U/ml to 200 U/ml. In some embodiments, the final concentration of the cytokine IL-21 in the cell culture media is 200 U/ml to 400 U/ml. In some embodiments, the final concentration of the cytokine IL-21 in the cell culture media is 400 U/ml to 600 U/ml. In some embodiments, the final concentration of the cytokine IL-21 in the cell culture media is 600 U/ml to 800 U/ml. In some embodiments, the final concentration of the cytokine IL-21 in the cell culture media is 800 U/ml to 1000 U/ml. In some embodiments, the final concentration of the cytokine IL-21 in the cell culture media is 1000 U/ml to 1200 U/ml. In some embodiments, the final concentration of the cytokine IL-21 in the cell culture media is 1200 U/ml to 1400 U/ml. In some embodiments, the final concentration of the cytokine IL-21 in the cell culture media is 1400 U/ml to 1600 U/ml. In some embodiments, the final concentration of the cytokine IL-21 in the cell culture media is 1600 U/ml to 1800 U/ml. In some embodiments, the final concentration of the cytokine IL-21 in the cell culture media is 1800 U/ml to 2000 U/ml. In some embodiments, the final concentration of the cytokine IL-21 in the cell culture media is 2000 U/ml to 3000 U/ml. In some embodiments, the final concentration of the cytokine IL-21 in the cell culture media is 3000 U/ml to 4000 U/ml. In some embodiments, the final concentration of the cytokine IL-21 in the cell culture media is 4000 U/ml to 5000 U/ml. In some embodiments, the final concentration of the cytokine IL-21 in the cell culture media is 5000 U/ml to 6000 U/ml. In some embodiments, the final concentration of the cytokine IL-21 in the cell culture media is 6000 U/ml to 7000 U/ml. In some embodiments, the final concentration of the cytokine IL-21 in the cell culture media is 7000 U/ml to 8000 U/ml. In some embodiments, the final concentration of the cytokine IL-21 in the cell culture media is 8000 U/ml to 9000 U/ml. In some embodiments, the final concentration of the cytokine IL-21 in the cell culture media is 9000 U/ml to 10,000 U/ml. In some embodiments, the final concentration of the cytokine IL-21 in the cell culture media is 10,000 U/ml to 11,000 U/ml. In some embodiments, the final concentration of the cytokine IL-21 in the cell culture media is 11,000 U/ml to 12,000 U/ml. In some embodiments, the final concentration of the cytokine IL-21 in the cell culture media is 12,000 U/ml to 13,000 U/ml. In some embodiments, the final concentration of the cytokine IL-21 in the cell culture media is 13,000 U/ml to 14,000 U/ml. In some embodiments, the final concentration of the cytokine IL-21 in the cell culture media is 14,000 U/ml to 15,000 U/ml. In some embodiments, the final concentration of the cytokine IL-21 in the cell culture media is 15,000 U/ml to 16,000 U/ml. In some embodiments, the final concentration of the cytokine IL-21 in the cell culture media is 16,000 U/ml to 17,000 U/ml. In some embodiments, the final concentration of the cytokine IL-21 in the cell culture media is 17,000 U/ml to 18,000 U/ml. In some embodiments, the final concentration of the cytokine IL-21 in the cell culture media is 18,000 U/ml to 19,000 U/ml. In some embodiments, the final concentration of the cytokine IL-21 in the cell culture media is 19,000 U/ml to 20,000 U/ml.

[0250] In some embodiments, the methods disclosed herein comprise contacting the disaggregated tumor sample and/or population of TILs with the cytokine IL-2. In some embodiments, the TILs are contacted with the cytokine IL-2 every other day. In some embodiments, the TILs are contacted with the cytokine IL-2 in time intervals of 2, 3, 4, 5, or 6 days. In some embodiments, the TILs are contacted with the cytokine IL-2 in a time interval of 2 days. In some embodiments, the TILs are contacted with the cytokine IL-2 in a time interval of 3 days. In some embodiments, the TILs are contacted with the cytokine IL-2 in a time interval of 4 days. In some embodiments, the TILs are contacted with the cytokine IL-2 in a time interval of 5 days. In some embodiments, the TILs are contacted with the cytokine IL-2 in a time interval of 6 days.

[0251] In some embodiments, the final concentration of the cytokine IL-2 in the cell culture media in the cell culture media is 0.51 ng/ml to 10,000 ng/ml. In some embodiments, the final concentration of the cytokine IL-2 in the cell culture media is 10 ng/ml to 10,000 ng/ml. In some embodiments, the final concentration of the cytokine IL-2 in the cell culture media is 0.5 ng/ml to 10 ng/ml. In some embodiments, the final concentration of the cytokine IL-2 in the cell culture media is 10 ng/ml to 25 ng/ml. In some embodiments, the final concentration of the cytokine IL-2 in the cell culture media is 25 ng/ml to 50 ng/ml. In some embodiments, the final concentration of the cytokine IL-2 in the cell culture media is 50 ng/ml to 75 ng/ml. In some embodiments, the final concentration of the cytokine IL-2 in the cell culture media is 75 ng/ml to 100 ng/ml. In some embodiments, the final concentration of the cytokine IL-2 in the cell culture media is 100 ng/ml to 200 ng/ml. In some embodiments, the final concentration of the cytokine IL-2 in the cell culture media is 200 ng/ml to 300 ng/ml. In some embodiments, the final concentration of the cytokine IL-2 in the cell culture media is 300 ng/ml to 400 ng/ml. In some embodiments, the final concentration of the cytokine IL-2 in the cell culture media is 400 ng/ml to 500 ng/ml. In some embodiments, the final concentration of the cytokine IL-2 in the cell culture media is 500 ng/ml to 600 ng/ml. In some embodiments, the final concentration of the cytokine IL-2 in the cell culture media is 600 ng/ml to 700 ng/ml. In some embodiments, the final concentration of the cytokine IL-2 in the cell culture media is 700 ng/ml to 800 ng/ml. In some embodiments, the final concentration of the cytokine IL-2 in the cell culture media is 800 ng/ml to 900 ng/ml. In some embodiments, the final concentration of the cytokine IL-2 in the cell culture media is 900 ng/ml to 1000 ng/ml. In some embodiments, the final concentration of the cytokine IL-2 in the cell culture media is 1,000 ng/ml to 1,500 ng/ml. In some embodiments, the final concentration of the cytokine IL-2 in the cell culture media is 1,500 ng/ml to 2,000 ng/ml. In some embodiments, the final concentration of the cytokine IL-2 in the cell culture media is 2,000 ng/ml to 2,500 ng/ml. In some embodiments, the final concentration of the cytokine IL-2 in the cell culture media is 2,500 ng/ml to 3,000 ng/ml. In some embodiments, the final concentration of the cytokine IL-2 in the cell culture media is 3,000 ng/ml to 3,500 ng/ml. In some embodiments, the final concentration of the cytokine IL-2 in the cell culture media is 3,500 ng/ml to 4,000 ng/ml. In some embodiments, the final concentration of the cytokine IL-2 in the cell culture media is 4,000 ng/ml to 4,500 ng/ml. In some embodiments, the final concentration of the cytokine IL-2 in the cell culture media is 4,500 ng/ml to 5,000 ng/ml. In some embodiments, the final concentration of the cytokine IL-2 in the cell culture media is 5,000 ng/ml to 5,500 ng/ml. In some embodiments, the final concentration of the cytokine IL-2 in the cell culture media is 5,500 ng/ml to 6,000 ng/ml. In some embodiments, the final concentration of the cytokine IL-2 in the cell culture media is 6,000 ng/ml to 6,500 ng/ml. In some embodiments, the final concentration of the cytokine IL-2 in the cell culture media is 6,500 ng/ml to 7,000 ng/ml. In some embodiments, the final concentration of the cytokine IL-2 in the cell culture media is 7,000 ng/ml to 7,500 ng/ml. In some embodiments, the final concentration of the cytokine IL-2 in the cell culture media is 7,500 ng/ml to 8,000 ng/ml. In some embodiments, the final concentration of the cytokine IL-2 in the cell culture media is 8,000 ng/ml to 8,500 ng/ml. In some embodiments, the final concentration of the cytokine IL-2 in the cell culture media is 8,500 ng/ml to 9,000 ng/ml. In some embodiments, the final concentration of the cytokine IL-2 in the cell culture media is 9,000 ng/ml to 9,500 ng/ml. In some embodiments, the final concentration of the cytokine IL-2 in the cell culture media is 9,500 ng/ml to 10,000 ng/ml.

[0252] In some embodiments, the final concentration of the cytokine IL-2 in the cell culture media in the cell culture media is 1 U/ml to 20,000 U/ml. In some embodiments, the final concentration of the cytokine IL-2 in the cell culture media is 2 U/ml to 20,000 U/ml. In some embodiments, the final concentration of the cytokine IL-2 in the cell culture media is 20 U/ml to 20,000 U/ml. In some embodiments, the final concentration of the cytokine IL-2 in the cell culture media is 2 U/ml to 20 U/ml. In some embodiments, the final concentration of the cytokine IL-2 in the cell culture media is 20 U/ml to 50 U/ml. In some embodiments, the final concentration of the cytokine IL-2 in the cell culture media is 50 U/ml to 100 U/ml. In some embodiments, the final concentration of the cytokine IL-2 in the cell culture media is 100 U/ml to 150 U/ml. In some embodiments, the final concentration of the cytokine IL-2 in the cell culture media is 150 U/ml to 200 U/ml. In some embodiments, the final concentration of the cytokine IL-2 in the cell culture media is 200 U/ml to 400 U/ml. In some embodiments, the final concentration of the cytokine IL-2 in the cell culture media is 400 U/ml to 600 U/ml. In some embodiments, the final concentration of the cytokine IL-2 in the cell culture media is 600 U/ml to 800 U/ml. In some embodiments, the final concentration of the cytokine IL-2 in the cell culture media is 800 U/ml to 1000 U/ml. In some embodiments, the final concentration of the cytokine IL-2 in the cell culture media is 1000 U/ml to 1200 U/ml. In some embodiments, the final concentration of the cytokine IL-2 in the cell culture media is 1200 U/ml to 1400 U/ml. In some embodiments, the final concentration of the cytokine IL-2 in the cell culture media is 1400 U/ml to 1600 U/ml. In some embodiments, the final concentration of the cytokine IL-2 in the cell culture media is 1600 U/ml to 1800 U/ml. In some embodiments, the final concentration of the cytokine IL-2 in the cell culture media is 1800 U/ml to 2000 U/ml. In some embodiments, the final concentration of the cytokine IL-2 in the cell culture media is 2000 U/ml to 3000 U/ml. In some embodiments, the final concentration of the cytokine IL-2 in the cell culture media is 3000 U/ml to 4000 U/ml. In some embodiments, the final concentration of the cytokine IL-2 in the cell culture media is 4000 U/ml to 5000 U/ml. In some embodiments, the final concentration of the cytokine IL-2 in the cell culture media is 5000 U/ml to 6000 U/ml. In some embodiments, the final concentration of the cytokine IL-2 in the cell culture media is 6000 U/ml to 7000 U/ml. In some embodiments, the final concentration of the cytokine IL-2 in the cell culture media is 7000 U/ml to 8000 U/ml. In some embodiments, the final concentration of the cytokine IL-2 in the cell culture media is 8000 U/ml to 9000 U/ml. In some embodiments, the final concentration of the cytokine IL-2 in the cell culture media is 9000 U/ml to 10,000 U/ml. In some embodiments, the final concentration of the cytokine IL-2 in the cell culture media is 10,000 U/ml to 11,000 U/ml. In some embodiments, the final concentration of the cytokine IL-2 in the cell culture media is 11,000 U/ml to 12,000 U/ml. In some embodiments, the final concentration of the cytokine IL-2 in the cell culture media is 12,000 U/ml to 13,000 U/ml. In some embodiments, the final concentration of the cytokine IL-2 in the cell culture media is 13,000 U/ml to 14,000 U/ml. In some embodiments, the final concentration of the cytokine IL-2 in the cell culture media is 14,000 U/ml to 15,000 U/ml. In some embodiments, the final concentration of the cytokine IL-2 in the cell culture media is 15,000 U/ml to 16,000 U/ml. In some embodiments, the final concentration of the cytokine IL-2 in the cell culture media is 16,000 U/ml to 17,000 U/ml. In some embodiments, the final concentration of the cytokine IL-2 in the cell culture media is 17,000 U/ml to 18,000 U/ml. In some embodiments, the final concentration of the cytokine IL-2 in the cell culture media is 18,000 U/ml to 19,000 U/ml. In some embodiments, the final concentration of the cytokine IL-2 in the cell culture media is 19,000 U/ml to 20,000 U/ml.

### Genetic Modification of TILs

[0253] In some cases, the TILs are genetically engineered to include additional functionalities, including, but not limited to, a high-affinity T cell receptor (TCR), e.g., a TCR targeted at a tumor-associated antigen such as MAGE-1, HER2, or NY-ESO-1, or a chimeric antigen receptor (CAR) which binds to a tumor-associated cell surface molecule (e.g., mesothelin) or lineage-restricted cell surface molecule (e.g., EGFR, CD19 or HER2).

[0254] In some embodiments, the present disclosure provides methods of manufacturing modified TILs comprising reduced expression and/or function of one or more endogenous genes. In some embodiments, the present disclosure provides methods of manufacturing modified TILs comprising a gene-regulating system capable of reducing the expression and/or function of one or more endogenous target genes. In some embodiments, these endogenous genes include ANKRD11, BCL2L11, BCL3, BCOR, CALM2, CBLB, CHIC2, CTLA4, DHODH, E2F8, EGR2, FLI1, FOXP3, GATA3, GNAS, HAVCR2, IKZF1, IKZF2, IKZF3, LAG3, MAP4K, NFKBIA, NR4A3, NRP1, PBRM1, PCBP1, PDCD1, PELI1, PIK3CD, PPP2R2D, PTPN1, PTPN2, PTPN22, PTPN6, RBM39, RC3H1, SEMA7A, SERPINA3, SETD5, SH2B3, SH2D1A, SMAD2, SOCS1, TANK, TGFBR1, TGFBR2, TIGIT, TNFAIP3, TNIP1, TRAF6, UMPS, WDR6 and ZC3H12A. (See International Publication Nos. WO 2019/178422, WO 2019/178420 and WO 2019/178421, incorporated by reference herein in their entireties.) In some embodiments, these genes include SOCS1, PTPN2, ZC3H12A, CBLB, RC3H1, NFKBIA. In some embodiments, these genes include SOCS1 and at least one, two or more genes selected from PTPN2, ZC3H12A, CBLB, RC3H1, and NFKBIA. In some embodiments, these genes include SOCS1 and ZC3H12A.

[0255] Herein, the term “modified TIL” encompasses TILs comprising one or more genomic modifications, effected through non-natural means, resulting in the reduced expression and/or function of one or more endogenous target genes as well as TILs comprising a non-naturally occurring gene-regulating system capable of reducing the expression and/or function of one or more endogenous target genes. The term, “modified TIL” is used interchangeably with the terms “engineered TIL” or “eTIL™”. Herein, an “un-modified TIL” or “control TIL” refers to a TIL or population of TILs wherein the genomes have not been modified through non-naturally occurring means and that does not comprise a non-naturally occurring gene-regulating system or comprises a control gene-regulating system (e.g., an empty vector control, a non-targeting gRNA, a scrambled siRNA, etc.). TILs that occur naturally that have reduced expression and/or function of one or more endogenous genes are included under the terms un-modified or control TILs.

[0256] In some embodiments, the modified TILs manufactured by the methods described herein comprise one or more modifications (e.g., insertions, deletions, or mutations of one or more nucleic acids) in the genomic DNA sequence of an endogenous target gene resulting in the reduced expression and/or function the endogenous gene. In such embodiments, the modified TILs comprise a “modified endogenous target gene.” In some embodiments, the modifications in the genomic DNA sequence reduce or inhibit mRNA transcription, thereby reducing the expression level of the encoded mRNA transcript and protein. In some embodiments, the modifications in the genomic DNA sequence reduce or inhibit mRNA translation, thereby reducing the expression level of the encoded protein. In some embodiments, the modifications in the genomic DNA sequence encode a modified endogenous protein with reduced or altered function compared to the unmodified (i.e., wild-type) version of the endogenous protein (e.g., a dominant-negative mutant, described infra). In some embodiments, the modified TILs comprise at least one, two or more modified endogenous target genes selected from SOCS1, PTPN2, ZC3H12A, CBLB, RC3H1 and NFKBIA. In some embodiments, the modified TILs comprise the modified endogenous target gene SOCS1 and at least one, two or more modified endogenous target genes selected from PTPN2, ZC3H12A, CBLB, RC3H1, and NFKBIA. In some embodiments, the modified TILs comprise the modified endogenous target genes SOCS1 and ZC3H12A.

[0257] In some embodiments, the modified TILs manufactured by the methods described herein comprise one or more genomic modifications at a genomic location other than an endogenous target gene that result in the reduced expression and/or function of the endogenous target gene or that result in the expression of a modified version of an endogenous protein. For example, in some embodiments, a polynucleotide sequence encoding a gene regulating system is inserted into one or more locations in the genome, thereby reducing the expression and/or function of an endogenous target gene upon the expression of the gene-regulating system. In some embodiments, a polynucleotide sequence encoding a modified version of an endogenous protein is inserted at one or more locations in the genome, wherein the function of the modified version of the protein is reduced compared to the un-modified or wild-type version of the protein (e.g., a dominant-negative mutant, described infra).

[0258] In some embodiments, the modified TILs manufactured by the methods described herein comprise one or more modified endogenous target genes, wherein the one or more modifications result in a reduced expression and/or function of a gene product (i.e., an mRNA transcript or a protein) encoded by the endogenous target gene compared to an unmodified TIL. For example, in some embodiments, modified TILs demonstrate reduced expression of an mRNA transcript and/or reduced expression of a protein. In some embodiments, the expression of the gene product in a modified TIL is reduced by at least 5% compared to the expression of the gene product in an unmodified TIL. In some embodiments, the expression of the gene product in a modified TIL is reduced by at least 10%, 20%, 30%, 40%, 50%, 60%, 70%, 80%, 90%, or more compared to the expression of the gene product in an unmodified TIL. In some embodiments, the modified TILs described herein demonstrate reduced expression and/or function of gene products encoded by a plurality (e.g., one or two or more) of endogenous target genes compared to the expression of the gene products in an unmodified TIL. For example, in some embodiments, a modified TIL demonstrates reduced expression and/or function of gene products from 2, 3, 4, 5, 6, 7, 8, 9, 10, or more endogenous target genes compared to the expression of the gene products in an unmodified TIL.

[0259] In some embodiments, the present disclosure provides a modified TIL manufactured by the methods described herein wherein one or more endogenous target genes, or a portion thereof, are deleted (i.e., “knocked-out”) such that the modified TIL does not express the mRNA transcript or protein. In some embodiments, a modified TIL comprises deletion of a plurality of endogenous target genes, or portions thereof. In some embodiments, a modified TIL comprises deletion of 2, 3, 4, 5, 6, 7, 8, 9, 10, or more endogenous target genes.

[0260] In some embodiments, the modified TILs manufactured by the methods described herein comprise one or more modified endogenous target genes, wherein the one or more modifications to the target DNA sequence result in expression of a protein with reduced or altered function (e.g., a “modified endogenous protein”) compared to the function of the corresponding protein expressed in an unmodified TIL (e.g., a “unmodified endogenous protein”). In some embodiments, the modified TILs described herein comprise 2, 3, 4, 5, 6, 7, 8, 9, 10, or more modified endogenous target genes encoding 2, 3, 4, 5, 6, 7, 8, 9, 10, or more modified endogenous proteins. In some embodiments, the modified endogenous protein demonstrates reduced or altered binding affinity for another protein expressed by the modified TIL or expressed by another cell; reduced or altered signaling capacity; reduced or altered enzymatic activity; reduced or altered DNA-binding activity; or reduced or altered ability to function as a scaffolding protein.

[0261] In some embodiments, the modified endogenous target gene comprises one or more dominant negative mutations. As used herein, a “dominant-negative mutation” refers to a substitution, deletion, or insertion of one or more nucleotides of a target gene such that the encoded protein acts antagonistically to the protein encoded by the unmodified target gene. The mutation is dominant-negative because the negative phenotype confers genic dominance over the positive phenotype of the corresponding unmodified gene. A gene comprising one or more dominant-negative mutations and the protein encoded thereby are referred to as a “dominant-negative mutants”, e.g., dominant-negative genes and dominant-negative proteins. In some embodiments, the dominant negative mutant protein is encoded by an exogenous transgene inserted at one or more locations in the genome of the TIL.

[0262] Various mechanisms for dominant negativity are known. Typically, the gene product of a dominant negative mutant retains some functions of the unmodified gene product but lacks one or more crucial other functions of the unmodified gene product. This causes the dominant-negative mutant to antagonize the unmodified gene product. For example, as an illustrative embodiment, a dominant-negative mutant of a transcription factor may lack a functional activation domain but retain a functional DNA binding domain. In this example, the dominant-negative transcription factor cannot activate transcription of the DNA as the unmodified transcription factor does, but the dominant-negative transcription factor can indirectly inhibit gene expression by preventing the unmodified transcription factor from binding to the transcription-factor binding site. As another illustrative embodiment, dominant-negative mutations of proteins that function as dimers are known. Dominant-negative mutants of such dimeric proteins may retain the ability to dimerize with unmodified protein but be unable to function otherwise. The dominant-negative monomers, by dimerizing with unmodified monomers to form heterodimers, prevent formation of functional homodimers of the unmodified monomers. Dominant negative mutations of the SOCS1 gene are known in the art and include the murine F59D mutant (See e.g., Hanada et al., J Biol Chem, 276:44:2 (2001), 40746-40754; and Suzuki et al., J Exp Med, 193:4 (2001), 471-482), and the human F58D mutant, identified by sequence alignments of the human and murine SOCS1 amino acid sequences.

[0263] In some embodiments, the modified TILs manufactured by the methods described herein comprise a gene-regulating system capable of reducing the expression and/or function of one or more endogenous target genes selected from ANKRD11, BCL2L11, BCL3, BCOR, CALM2, CBLB, CHIC2, CTLA4, DHODH, E2F8, EGR2, FLI1, FOXP3, GATA3, GNAS, HAVCR2, IKZF1, IKZF2, IKZF3, LAG3, MAP4K, NFKBIA, NR4A3, NRP1, PBRM1, PCBP1, PDCD1, PELI1, PIK3CD, PPP2R2D, PTPN1, PTPN2, PTPN22, PTPN6, RBM39, RC3H1, SEMA7A, SERPINA3, SETD5, SH2B3, SH2DA, SMAD2, SOCS1, TANK, TGFBR1, TGFBR2, TIGIT, TNFAIP3, TNIP1, TRAF6, UMPS, WDR6 and ZC3H12A. (See International Publication Nos. WO 2019/178422, WO 2019/178420 and WO 2019/178421, incorporated by reference herein in their entireties.) In some embodiments, the modified TILs manufactured by the methods described herein comprise a gene-regulating system capable of reducing the expression and/or function of one or more endogenous target genes selected from SOCS1, PTPN2, ZC3H12A, CBLB, RC3H and NFKBIA. In some embodiments, the modified TILs described herein comprise a gene-regulating system capable of reducing the expression and/or function of one or more endogenous target genes selected from SOCS1 and at least one, two or more modified endogenous target genes selected from PTPN2, ZC3H12A, CBLB, RC3H, and NFKBIA. In some embodiments, the modified TILs described herein comprise a gene-regulating system capable of reducing the expression and/or function of SOCS1 and ZC3H12A. In some embodiments, the modified TILs manufactured by the methods described herein comprise a gene-regulating system capable of reducing the expression and/or function of two or more endogenous target genes selected from ANKRD11, BCL2L11, BCL3, BCOR, CALM2, CBLB, CHIC2, CTLA4, DHODH, E2F8, EGR2, FLI1, FOXP3, GATA3, GNAS, HAVCR2, IKZF1, IKZF2, IKZF3, LAG3, MAP4K, NFKBIA, NR4A3, NRP1, PBRM1, PCBP1, PDCD1, PELI1, PIK3CD, PPP2R2D, PTPN1, PTPN2, PTPN22, PTPN6, RBM39, RC3H, SEMA7A, SERPINA3, SETD5, SH2B3, SH2D1A, SMAD2, SOCS1, TANK, TGFBR1, TGFBR2, TIGIT, TNFAIP3, TNIP1, TRAF6, UMPS, WDR6 and ZC3H12A. In some embodiments, the modified TILs manufactured by the methods described herein comprise a gene-regulating system capable of reducing the expression and/or function of two or more endogenous target genes selected from SOCS1, PTPN2, ZC3H12A, CBLB, RC3H and NFKBIA. In some embodiments, the modified TILs described herein comprise a gene-regulating system capable of reducing the expression and/or function of SOCS1 and at least one, two or more modified endogenous target genes selected from PTPN2, ZC3H12A, CBLB, RC3H, and NFKBIA. In some embodiments, the modified TILs described herein comprise a gene-regulating system capable of reducing the expression and/or function of SOCS1 and ZC3H12A. The gene-regulating system can reduce the expression and/or function of the endogenous target genes modifications by a variety of mechanisms including by modifying the genomic DNA sequence of the endogenous target gene (e.g., by insertion, deletion, or mutation of one or more nucleic acids in the genomic DNA sequence); by regulating transcription of the endogenous target gene (e.g., inhibition or repression of mRNA transcription); and/or by regulating translation of the endogenous target gene (e.g., by mRNA degradation).

[0264] In some embodiments, the modified TILs manufactured by the methods described herein comprise a gene-regulating system comprising:

[0265] (a) one or more nucleic acid molecules capable of reducing the expression and/or modifying the function of a gene product encoded by one or more endogenous target genes selected from SOCS1, PTPN2, ZC3H12A, CBLB, RC3H and NFKBIA;

[0266] (b) one or more polynucleotides encoding one or more nucleic acid molecules that are capable of reducing the expression and/or modifying the function of the gene products encoded by one or more endogenous target genes selected from SOCS1, PTPN2, ZC3H12A, CBLB, RC3H and NFKBIA;

[0267] (c) one or more proteins capable of reducing the expression and/or modifying the function of the gene products encoded by one or more endogenous target genes selected from SOCS1, PTPN2, ZC3H12A, CBLB, RC3H and NFKBIA;

[0268] (d) one or more polynucleotides encoding one or more proteins that are capable of reducing the expression and/or modifying the function of a gene product encoded by one or more endogenous target genes selected from SOCS1, PTPN2, ZC3H12A, CBLB, RC3H and NFKBIA;

[0269] (e) one or more guide RNAs (gRNAs) capable of binding to a target DNA sequence in one or more endogenous genes selected from SOCS1, PTPN2, ZC3H12A, CBLB, RC3H and NFKBIA;

[0270] (f) one or more polynucleotides encoding one or more gRNAs capable of binding to a target DNA sequence in one or more endogenous genes selected from SOCS1, PTPN2, ZC3H12A, CBLB, RC3H1 and NFKBIA;

[0271] (g) one or more site-directed modifying polypeptides capable of interacting with a gRNA and modifying a target DNA sequence in an endogenous gene selected from SOCS1, PTPN2, ZC3H12A, CBLB, RC3H1 and NFKBIA;

[0272] (h) one or more polynucleotides encoding a site-directed modifying polypeptide capable of interacting with a gRNA and modifying a target DNA sequence in an endogenous gene selected from SOCS1, PTPN2, ZC3H12A, CBLB, RC3H1 and NFKBIA;

[0273] (i) one or more guide DNAs (gDNAs) capable of binding to a target DNA sequence in two or more endogenous genes selected from SOCS1, PTPN2, ZC3H12A, CBLB, RC3H1 and NFKBIA;

[0274] (j) one or more polynucleotides encoding one or more gDNAs capable of binding to a target DNA sequence in two or more endogenous genes selected from SOCS1, PTPN2, ZC3H12A, CBLB, RC3H1 and NFKBIA;

[0275] (k) one or more site-directed modifying polypeptides capable of interacting with a gDNA and modifying a target DNA sequence in an endogenous gene selected from SOCS1, PTPN2, ZC3H12A, CBLB, RC3H1 and NFKBIA;

[0276] (l) one or more polynucleotides encoding a site-directed modifying polypeptide capable of interacting with a gDNA and modifying a target DNA sequence in an endogenous gene selected from SOCS1, PTPN2, ZC3H12A, CBLB, RC3H1 and NFKBIA;

[0277] (m) one or more gRNAs capable of binding to a target mRNA sequence encoded by one or more endogenous genes selected from SOCS1, PTPN2, ZC3H12A, CBLB, RC3H1 and NFKBIA;

[0278] (n) one or more polynucleotides encoding one or more gRNAs capable of binding to a target mRNA sequence encoded by two or more endogenous genes selected from SOCS1, PTPN2, ZC3H12A, CBLB, RC3H1 and NFKBIA;

[0279] (o) one or more site-directed modifying polypeptides capable of interacting with a gRNA and modifying a target mRNA sequence encoded by an endogenous gene selected from SOCS1, PTPN2, ZC3H12A, CBLB, RC3H1 and NFKBIA;

[0280] (p) one or more polynucleotides encoding a site-directed modifying polypeptide capable of interacting with a gRNA and modifying a target mRNA sequence encoded by an endogenous gene selected from SOCS1, PTPN2, ZC3H12A, CBLB, RC3H1 and NFKBIA; or

[0281] (q) any combination of the above.

[0282] In some embodiments, the modified TILs manufactured by the methods described herein comprise a gene-regulating system comprising:

[0283] (a) two or more nucleic acid molecules capable of reducing the expression and/or modifying the function of a gene product encoded by two or more endogenous target genes selected from SOCS1, PTPN2, ZC3H12A, CBLB, RC3H and NFKBIA;

[0284] (b) one or more polynucleotides encoding two or more nucleic acid molecules that are capable of reducing the expression and/or modifying the function of the gene products encoded by two or more endogenous target genes selected from SOCS1, PTPN2, ZC3H12A, CBLB, RC3H and NFKBIA;

[0285] (c) two or more proteins capable of reducing the expression and/or modifying the function of the gene products encoded by two or more endogenous target genes selected from SOCS1, PTPN2, ZC3H12A, CBLB, RC3H and NFKBIA;

[0286] (d) one or more polynucleotides encoding two or more proteins that are capable of reducing the expression and/or modifying the function of a gene product encoded by two or more endogenous target genes selected from SOCS1, PTPN2, ZC3H12A, CBLB, RC3H and NFKBIA;

[0287] (e) two or more guide RNAs (gRNAs) capable of binding to a target DNA sequence in two or more endogenous genes selected from SOCS1, PTPN2, ZC3H12A, CBLB, RC3H and NFKBIA;

[0288] (f) one or more polynucleotides encoding two or more gRNAs capable of binding to a target DNA sequence in two or more endogenous genes selected from SOCS1, PTPN2, ZC3H12A, CBLB, RC3H and NFKBIA;

[0289] (g) two or more guide DNAs (gDNAs) capable of binding to a target DNA sequence in two or more endogenous genes selected from SOCS1, PTPN2, ZC3H12A, CBLB, RC3H and NFKBIA;

[0290] (h) one or more polynucleotides encoding two or more gDNAs capable of binding to a target DNA sequence in two or more endogenous genes selected from SOCS1, PTPN2, ZC3H12A, CBLB, RC3H and NFKBIA;

[0291] (i) two or more gRNAs capable of binding to a target mRNA sequence encoded by two or more endogenous genes selected from SOCS1, PTPN2, ZC3H12A, CBLB, RC3H1 and NFKBIA;

[0292] (j) one or more polynucleotides encoding two or more gRNAs capable of binding to a target mRNA sequence encoded by two or more endogenous genes selected from SOCS1, PTPN2, ZC3H12A, CBLB, RC3H1 and NFKBIA;

[0293] (k) any combination of the above.

[0294] In some embodiments, one, two or more polynucleotides encoding the gene-regulating system are inserted into the genome of the TILs. In some embodiments, one, two or more polynucleotides encoding the gene-regulating system are expressed episomally and are not inserted into the genome of the TILs.

[0295] In some embodiments, the modified TILs manufactured by the methods described herein comprise reduced expression and/or function of one, two or more endogenous target genes and further comprise one or more exogenous transgenes inserted at one or more genomic loci (e.g., a genetic “knock-in”). In some embodiments, the one, two or more exogenous transgenes encode detectable tags, safety-switch systems, chimeric switch receptors, and/or engineered antigen-specific receptors.

[0296] In some embodiments, the modified TILs manufactured by the methods described herein further comprise an exogenous transgene encoding a detectable tag. Examples of detectable tags include but are not limited to, FLAG tags, poly-histidine tags (e.g., 6×His), SNAP tags, Halo tags, cMyc tags, glutathione-S-transferase tags, avidin, enzymes, fluorescent proteins, luminescent proteins, chemiluminescent proteins, bioluminescent proteins, and phosphorescent proteins. In some embodiments the fluorescent protein is selected from the group consisting of blue/UV proteins (such as BFP, TagBFP, mTagBFP2, Azurite, EBFP2, mKalama1, Sirius, Sapphire, and T-Sapphire); cyan proteins (such as CFP, eCFP, Cerulean, SCFP3A, mTurquoise, mTurquoise2, monomeric Midoriishi-Cyan, TagCFP, and mTFP1); green proteins (such as: GFP, eGFP, meGFP (A208K mutation), Emerald, Superfolder GFP, Monomeric Azami Green, TagGFP2, mUKG, mWasabi, Clover, and mNeonGreen); yellow proteins (such as YFP, eYFP, Citrine, Venus, SYFP2, and TagYFP); orange proteins (such as Monomeric Kusabira-Orange, mKOx, mKO2, mOrange, and mOrange2); red proteins (such as RFP, mRaspberry, mCherry, mStrawberry, mTangerine, tdTomato, TagRFP, TagRFP-T, mApple, mRuby, and mRuby2); far-red proteins (such as mPlum, HcRed-Tandem, mKate2, mNeptune, and NirFP); near-infrared proteins (such as TagRFP657, IFP1.4, and iRFP); long stokes shift proteins (such as mKeima Red, LSS-mKate1, LSS-mKate2, and mBeRFP); photoactivatible proteins (such as PA-GFP, PAmCherry1, and PATagRFP); photoconvertible proteins (such as Kaede (green), Kaede (red), KikGR1 (green), KikGR1 (red), PS-CFP2, PS-CFP2, mEos2 (green), mEos2 (red), mEos3.2 (green), mEos3.2 (red), PSmOrange, and PSmOrange); and photoswitchable proteins (such as Dronpa). In some embodiments, the detectable tag can be selected from AmCyan, AsRed, DsRed2, DsRed Express, E2-Crimson, HcRed, ZsGreen, ZsYellow, mCherry, mStrawberry, mOrange, mBanana, mPlum, mRasberry, tdTomato, DsRed Monomer, and/or AcGFP, all of which are available from Clontech.

[0297] In some embodiments, the modified TILs manufactured by the methods described herein further comprise an exogenous transgene encoding a safety-switch system. Safety-switch systems (also referred to in the art as suicide gene systems) comprise exogenous transgenes encoding for one or more proteins that enable the elimination of a modified TIL after the TIL has been administered to a subject. Examples of safety-switch systems are known in the art. For example, safety-switch systems include genes encoding for proteins that convert non-toxic pro-drugs into toxic compounds such as the Herpes simplex thymidine kinase (Hsv-tk) and ganciclovir (GCV) system (Hsv-tk/GCV). Hsv-tk converts non-toxic GCV into a cytotoxic compound that leads to cellular apoptosis. As such, administration of GCV to a subject that has been treated with modified TILs comprising a transgene encoding the Hsv-tk protein can selectively eliminate the modified TILs while sparing endogenous TILs. (See e.g., Bonini et al., Science, 1997, 276(5319):1719-1724; Ciceri et al., Blood, 2007, 109(11):1828-1836; Bondanza et al., Blood 2006, 107(5):1828-1836, incorporated herein by reference in their entireties).

[0298] Additional safety-switch systems include genes encoding for cell-surface markers, enabling elimination of modified TILs by administration of a monoclonal antibody specific for the cell-surface marker via ADCC. In some embodiments, the cell-surface marker is CD20 and the modified TILs can be eliminated by administration of an anti-CD20 monoclonal antibody such as Rituximab (see e.g., Introna et al., Hum Gene Ther, 2000, 11(4):611-620; Serafini et al., Hum Gene Ther, 2004, 14, 63-76; van Meerten et al., Gene Ther, 2006, 13, 789-797, incorporated herein by reference in their entireties). Similar systems using EGF-R and Cetuximab or Panitumumab are described in International PCT Publication No. WO 2018006880, incorporated herein by reference in its entirety. Additional safety-switch systems include transgenes encoding pro-apoptotic molecules comprising one or more binding sites for a chemical inducer of dimerization (CID), enabling elimination of modified TILs by administration of a CID which induces oligomerization of the pro-apoptotic molecules and activation of the apoptosis pathway. In some embodiments, the pro-apoptotic molecule is Fas (also known as CD95) (Thomis et al., Blood, 2001, 97(5), 1249-1257, incorporated herein by reference in its entirety). In some embodiments, the pro-apoptotic molecule is caspase-9 (Straathof et al., Blood, 2005, 105(11), 4247-4254, incorporated herein by reference in its entirety).

[0299] In some embodiments, the modified TILs manufactured by the methods described herein further comprise an exogenous transgene encoding a chimeric switch receptor. Chimeric switch receptors are engineered cell-surface receptors comprising an extracellular domain from an endogenous cell-surface receptor and a heterologous intracellular signaling domain, such that ligand recognition by the extracellular domain results in activation of a different signaling cascade than that activated by the wild-type form of the cell-surface receptor. In some embodiments, the chimeric switch receptor comprises the extracellular domain of an inhibitory cell-surface receptor fused to an intracellular domain that leads to the transmission of an activating signal rather than the inhibitory signal normally transduced by the inhibitory cell-surface receptor. In particular embodiments, extracellular domains derived from cell-surface receptors known to inhibit immune effector cell activation can be fused to activating intracellular domains. Engagement of the corresponding ligand will then activate signaling cascades that increase, rather than inhibit, the activation of the immune effector cell. For example, in some embodiments, the modified TILs described herein comprise a transgene encoding a PD1-CD28 switch receptor, wherein the extracellular domain of PD1 is fused to the intracellular signaling domain of CD28 (See e.g., Liu et al., Cancer Res 76:6 (2016), 1578-1590 and Moon et al., Molecular Therapy 22 (2014), S201, incorporated herein by reference in its entirety). In some embodiments, the modified TILs described herein comprise a transgene encoding the extracellular domain of CD200R and the intracellular signaling domain of CD28 (See Oda et al., Blood 130:22 (2017), 2410-2419, incorporated herein by reference in its entirety).

[0300] In some embodiments, the modified TILs manufactured by the methods described herein further comprise an engineered antigen-specific receptor recognizing a protein target expressed by a target cell, such as a tumor cell or an antigen presenting cell (APC), referred to herein as “modified receptor-engineered cells” or “modified RE-cells”. The term “engineered antigen receptor” refers to a non-naturally occurring antigen-specific receptor such as a chimeric antigen receptor (CAR) or a recombinant T cell receptor (TCR). In some embodiments, the engineered antigen receptor is a CAR comprising an extracellular antigen binding domain fused via hinge and transmembrane domains to a cytoplasmic domain comprising a signaling domain. In some embodiments, the CAR extracellular domain binds to an antigen expressed by a target cell in an MHC-independent manner leading to activation and proliferation of the RE cell. In some embodiments, the extracellular domain of a CAR recognizes a tag fused to an antibody or antigen-binding fragment thereof. In such embodiments, the antigen-specificity of the CAR is dependent on the antigen-specificity of the labeled antibody, such that a single CAR construct can be used to target multiple different antigens by substituting one antibody for another (See e.g., U.S. Pat. Nos. 9,233,125 and 9,624,279; US Patent Application Publication Nos. 20150238631 and 20180104354, incorporated herein by reference in their entireties). In some embodiments, the extracellular domain of a CAR may comprise an antigen binding fragment derived from an antibody. Antigen binding domains that are useful in the present disclosure include, for example, scFvs; antibodies; antigen binding regions of antibodies; variable regions of the heavy/light chains; and single chain antibodies.

[0301] In some embodiments, the intracellular signaling domain of a CAR may be derived from the TCR complex zeta chain (such as CD3 signaling domains), FcγRIII, FcRI, or the T-lymphocyte activation domain. In some embodiments, the intracellular signaling domain of a CAR further comprises a costimulatory domain, for example a 4-1BB, CD28, CD40, MyD88, or CD70 domain. In some embodiments, the intracellular signaling domain of a CAR comprises two costimulatory domains, for example any two of 4-1BB, CD28, CD40, MyD88, or CD70 domains. Exemplary CAR structures and intracellular signaling domains are known in the art (See e.g., WO 2009/091826; US 20130287748; WO 2015/142675; WO 2014/055657; and WO 2015/090229, incorporated herein by reference).

[0302] CARs specific for a variety of tumor antigens are known in the art, for example CD171-specific CARs (Park et al., Mol Ther (2007) 15(4):825-833), EGFRvIII-specific CARs (Morgan et al., Hum Gene Ther (2012) 23(10):1043-1053), EGF-R-specific CARs (Kobold et al., J Natl Cancer Inst (2014) 107(1):364), carbonic anhydrase K-specific CARs (Lamers et al., Biochem Soc Trans (2016) 44(3):951-959), FR-α-specific CARs (Kershaw et al., Clin Cancer Res (2006) 12(20):6106-6015), HER2-specific CARs (Ahmed et al., J Clin Oncol (2015) 33(15)1688-1696; Nakazawa et al., Mol Ther (2011) 19(12):2133-2143; Ahmed et al., Mol Ther (2009) 17(10):1779-1787; Luo et al., Cell Res (2016) 26(7):850-853; Morgan et al., Mol Ther (2010) 18(4):843-851; Grada et al., Mol Ther Nucleic Acids (2013) 9(2):32), CEA-specific CARs (Katz et al., Clin Cancer Res (2015) 21(14):3149-3159), IL13Ra2-specific CARs (Brown et al., Clin Cancer Res (2015) 21(18):4062-4072), GD2-specific CARs (Louis et al., Blood (2011) 118(23):6050-6056; Caruana et al., Nat Med (2015) 21(5):524-529), ErbB2-specific CARs (Wilkie et al., J Clin Immunol (2012) 32(5):1059-1070), VEGF-R-specific CARs (Chinnasamy et al., Cancer Res (2016) 22(2):436-447), FAP-specific CARs (Wang et al., Cancer Immunol Res (2014) 2(2):154-166), MSLN-specific CARs (Moon et al, Clin Cancer Res (2011) 17(14):4719-30), NKG2D-specific CARs (VanSeggelen et al., Mol Ther (2015) 23(10):1600-1610), CD19-specific CARs (Axicabtagene ciloleucel (Yescarta®) and Tisagenlecleucel (Kymriah®). See also, Li et al., J Hematol and Oncol (2018) 11(22), reviewing clinical trials of tumor-specific CARs. Exemplary CARs suitable for use according to the present disclosure are described below in Table 2.

TABLE 2
Exemplary CAR constructs

| | | | | | AA | NA |
|---|---|---|---|---|---|---|
| | | Ag-binding | Intracellular | Transmembrane | SEQ | SEQ |
| CAR Ref ID | Target | domain | Domain | Domain | ID | ID |
| KSQCAR017 | human | Cetuximab | CD3 zeta | CD8a hinge | 906 | 907 |
| | EGFR | H225 scFv | | | | |
| KSQCAR1909 | human | FMC63 | CD3 zeta | CD8a hinge | 908 | 909 |
| | CD19 | scFv | | | | |
| KSQCAR010 | human | Herceptin | CD3 zeta | CD8a hinge | 910 | 911 |
| | HER2 | scFv | | | | |

[0303] In some embodiments, the engineered antigen receptor is a recombinant TCR. Recombinant TCRs comprise TCRα and/or TCRβ chains that have been isolated and cloned from T cell populations recognizing a particular target antigen. For example, TCRα and/or TCRβ genes (i.e., TRAC and TRBC) can be cloned from T cell populations isolated from individuals with particular malignancies or T cell populations that have been isolated from humanized mice immunized with specific tumor antigens or tumor cells. Recombinant TCRs recognize antigen through the same mechanisms as their endogenous counterparts (e.g., by recognition of their cognate antigen presented in the context of major histocompatibility complex (MHC) proteins expressed on the surface of a target cell). This antigen engagement stimulates endogenous signal transduction pathways leading to activation and proliferation of the TCR-engineered cells.

[0304] Recombinant TCRs specific for tumor antigens are known in the art, for example WT1-specific TCRs (JTCR016, Juno Therapeutics; WT1-TCRc4, described in US Patent Application Publication No. 20160083449), MART-1 specific TCRs (including the DMF4T clone, described in Morgan et al., Science 314 (2006) 126-129); the DMF5T clone, described in Johnson et al., Blood 114 (2009) 535-546); and the ID3T clone, described in van den Berg et al., Mol. Ther. 23 (2015) 1541-1550), gp100-specific TCRs (Johnson et al., Blood 114 (2009) 535-546), CEA-specific TCRs (Parkhurst et al., Mol Ther. 19 (2011) 620-626), NY-ESO and LAGE-1 specific TCRs (1G4T clone, described in Robbins et al., J Clin Oncol 26 (2011) 917-924; Robbins et al., Clin Cancer Res 21 (2015) 1019-1027; and Rapoport et al., Nature Medicine 21 (2015) 914-921), and MAGE-A3-specific TCRs (Morgan et al., J Immunother 36 (2013) 133-151) and Linette et al., Blood 122 (2013) 227-242). (See also, Debets et al., Seminars in Immunology 23 (2016) 10-21).

[0305] To generate the recombinant TCRs, the native TRAC (SEQ ID NO: 885) and TRBC (SEQ ID NOs: 886) protein sequences are fused to the C-terminal ends of TCR-α and TCR-β chain variable regions specific for a protein or peptide of interest. For example, the engineered TCR can recognize the NY-ESO peptide (SLLMWITQC, SEQ ID NO: 887), such as the 1G4 TCR or the 95:LY TCR (Robbins et al, Journal of Immunology 2008 180:6116-6131). In such illustrative embodiments, the paired 1G4-TCR α/β chains comprise SEQ ID NOs: 888 and 889, respectively and the paired 95:LY-TCR α/β chains comprise SEQ ID NOs: 890 and 891, respectively. The recombinant TCR can recognize the MART-1 peptide (AAGIGILTV, SEQ ID NO: 892), such as the DMF4 and DMF5 TCRs (Robbins et al, Journal of Immunology 2008 180:6116-6131). In such illustrative embodiments, the paired DMF4-TCR α/β chains comprise SEQ ID NOs: 893 and 894, respectively and the paired DMF5-TCR α/β chains comprise SEQ ID NOs: 895 and 896, respectively. The recombinant TCR can recognize the WT-1 peptide (RMFPNAPYL, SEQ ID NO: 897), such as the DLT TCR (Robbins et al, Journal of Immunology 2008 180:6116-6131). In such illustrative embodiments, the paired high-affinity DLT-TCR α/β chains comprise SEQ ID NOs: 898 and 899, respectively.

[0306] Codon-optimized DNA sequences encoding the recombinant TCRα and TCRβ chain proteins can be generated such that expression of both TCR chains is driven off of a single promoter in a stoichiometric fashion. In such embodiment, the P2A sequence (SEQ ID NO: 900) can be inserted between the DNA sequences encoding the TCRβ and the TCRα chain, such that the expression cassettes encoding the recombinant TCR chains comprise the following format: TCRβ-P2A-TCRα. As an illustrative embodiment, the protein sequence of the 1G4 NY-ESO-specific TCR expressed from such a cassette would comprise SEQ ID NO: 901, the protein sequence of the 95:LY NY-ESO-specific TCR expressed from such a cassette would comprise SEQ ID NO: 902, the protein sequence of the DMF4 MART1-specific TCR expressed from such a cassette would comprise SEQ ID NO: 903, the protein sequence of the DMF5 MART1-specific TCR expressed from such a cassette would comprise SEQ ID NO: 904, and the protein sequence of the DLT WT1-specific TCR expressed from such a cassette would comprise SEQ ID NO: 905.

[0307] In some embodiments, the engineered antigen receptor is directed against a target antigen selected from a cluster of differentiation molecule, such as CD3, CD4, CD8, CD16, CD24, CD25, CD33, CD34, CD45, CD64, CD71, CD78, CD80 (also known as B7-1), CD86 (also known as B7-2), CD96, CD116, CD117, CD123, CD133, and CD138, CD371 (also known as CLL1); a tumor-associated surface antigen, such as 5T4, BCMA (also known as CD269 and TNFRSF17, UniProt #Q02223), carcinoembryonic antigen (CEA), carbonic anhydrase 9 (CAIX or MN/CAIX), CD19, CD20, CD22, CD30, CD40, disialogangliosides such as GD2, ELF2M, ductal-epithelial mucin, ephrin B2, epithelial cell adhesion molecule (EpCAM), ErbB2 (HER2/neu), FCRL5 (UniProt #Q68SN8), FKBP11 (UniProt #Q9NYL4), glioma-associated antigen, glycosphingolipids, gp36, GPRC5D (UniProt #Q9NZD1), mut hsp70-2, intestinal carboxyl esterase, IGF-I receptor, ITGA8 (UniProt #P53708), KAMP3, LAGE-1a, MAGE, mesothelin, neutrophil elastase, NKG2D, Nkp30, NY-ESO-1, PAP, prostase, prostate-carcinoma tumor antigen-1 (PCTA-1), prostate specific antigen (PSA), PSMA, prostein, RAGE-1, ROR1, RU1 (SFMBTi), RU2 (DCDC2), SLAMF7 (UniProt #Q9NQ25), survivin, TAG-72, and telomerase; a major histocompatibility complex (MHC) molecule presenting a tumor-specific peptide epitope; tumor stromal antigens, such as the extra domain A (EDA) and extra domain B (EDB) of fibronectin; the A1 domain of tenascin-C (TnC A1) and fibroblast associated protein (FAP); cytokine receptors, such as epidermal growth factor receptor (EGFR), EGFR variant III (EGFRvIII), TFGβ-R or components thereof such as endoglin; a major histocompatibility complex (MHC) molecule; a virus-specific surface antigen such as an HIV-specific antigen (such as HIV gp120); an EBV-specific antigen, a CMV-specific antigen, a HPV-specific antigen, a Lassa virus-specific antigen, an Influenza virus-specific antigen as well as any derivate or variant of these surface antigens.

[0308] In some embodiments, the present disclosure provides methods of manufacturing modified TILs comprising reduced expression and/or function of one, two or more endogenous target genes. In some embodiments, these endogenous genes include ANKRD11, BCL2L11, BCL3, BCOR, CALM2, CBLB, CHIC2, CTLA4, DHODH, E2F8, EGR2, FLI1, FOXP3, GATA3, GNAS, HAVCR2, IKZF1, IKZF2, IKZF3, LAG3, MAP4K, NFKBIA, NR4A3, NRP1, PBRM1, PCBP1, PDCD1, PELI1, PIK3CD, PPP2R2D, PTPN1, PTPN2, PTPN22, PTPN6, RBM39, RC3H, SEMA7A, SERPINA3, SETD5, SH2B3, SH2D1A, SMAD2, SOCS1, TANK, TGFBR1, TGFBR2, TIGIT, TNFAIP3, TNIP1, TRAF6, UMPS, WDR6 and ZC3H12A. (See International Publication Nos. WO 2019/178422, WO 2019/178420 and WO 2019/178421, incorporated by reference herein in their entireties.)

[0309] In some embodiments, the present disclosure provides methods of manufacturing modified TILs comprising reduced expression and/or function of SOCS1 and ZC3H12A, PTPN2, CBLB, RC3H or NFKBIA or a gene-regulating system capable of reducing the expression and/or function of SOCS1 and ZC3H12A, PTPN2, CBLB, RC3H or NFKBIA and further comprising a CAR or recombinant TCR expressed on the cell surface. In some embodiments, the modified TILs comprise reduced expression and/or function of SOCS1 and ZC3H12A, PTPN2, CBLB, RC3H or NFKBIA or a gene-regulating system capable of reducing the expression and/or function of SOCS1 and ZC3H12A, PTPN2, CBLB, RC3H1 or NFKBIA and further comprising a recombinant expression vector encoding a CAR or a recombinant TCR.

[0310] In some embodiments, the present disclosure provides methods of manufacturing modified TILs comprising reduced expression and/or function of SOCS1 and PTPN2 or a gene-regulating system capable of reducing the expression and/or function of SOCS1 and PTPN2 and further comprising a CAR or recombinant TCR expressed on the cell surface. In some embodiments, the modified TILs comprise reduced expression and/or function of SOCS1 and PTPN2 or a gene-regulating system capable of reducing the expression and/or function of SOCS1 and PTPN2 and further comprising a recombinant expression vector encoding a CAR or a recombinant TCR.

[0311] In some embodiments, the present disclosure provides methods of manufacturing modified TILs comprising reduced expression and/or function of SOCS1 and ZC3H12A or a gene-regulating system capable of reducing the expression and/or function of SOCS1 and ZC3H12A and further comprising a CAR or recombinant TCR expressed on the cell surface. In some embodiments, the modified TILs comprise reduced expression and/or function of SOCS1 and ZC3H12A or a gene-regulating system capable of reducing the expression and/or function of SOCS1 and ZC3H12A and further comprising a recombinant expression vector encoding a CAR or a recombinant TCR.

[0312] In some embodiments, the present disclosure provides methods of manufacturing modified TILs comprising reduced expression and/or function of PTPN2 and ZC3H12A or a gene-regulating system capable of reducing the expression and/or function of PTPN2 and ZC3H12A and further comprising a CAR or recombinant TCR expressed on the cell surface. In some embodiments, the modified TILs comprise reduced expression and/or function of PTPN2 and ZC3H12A or a gene-regulating system capable of reducing the expression and/or function of PTPN2 and ZC3H12A and further comprising a recombinant expression vector encoding a CAR or a recombinant TCR.

[0313] In some embodiments, the present disclosure provides methods of manufacturing modified TILs comprising reduced expression and/or function of PTPN2 and CBLB or a gene-regulating system capable of reducing the expression and/or function of PTPN2 and CBLB and further comprising a CAR or recombinant TCR expressed on the cell surface. In some embodiments, the modified TILs comprise reduced expression and/or function of PTPN2 and CBLB or a gene-regulating system capable of reducing the expression and/or function of PTPN2 and CBLB and further comprising a recombinant expression vector encoding a CAR or a recombinant TCR.

[0314] In some embodiments, the present disclosure provides methods of manufacturing modified TILs comprising reduced expression and/or function of ZC3H12A and CBLB or a gene-regulating system capable of reducing the expression and/or function of ZC3H12A and CBLB and further comprising a CAR or recombinant TCR expressed on the cell surface. In some embodiments, the modified TILs comprise reduced expression and/or function of ZC3H12A and CBLB or a gene-regulating system capable of reducing the expression and/or function of ZC3H12A and CBLB and further comprising a recombinant expression vector encoding a CAR or a recombinant TCR.

[0315] In some embodiments, the present disclosure provides methods of manufacturing modified TILs comprising reduced expression and/or function of SOCS1 and CBLB or a gene-regulating system capable of reducing the expression and/or function of SOCS1 and CBLB and further comprising a CAR or recombinant TCR expressed on the cell surface. In some embodiments, the modified TILs comprise reduced expression and/or function of SOCS1 and CBLB or a gene-regulating system capable of reducing the expression and/or function of SOCS1 and CBLB and further comprising a recombinant expression vector encoding a CAR or a recombinant TCR.

[0316] In some embodiments, the present disclosure provides methods of manufacturing modified TILs comprising reduced expression and/or function of PTPN2 and RC3H1 or a gene-regulating system capable of reducing the expression and/or function of PTPN2 and RC3H1 and further comprising a CAR or recombinant TCR expressed on the cell surface. In some embodiments, the modified TILs comprise reduced expression and/or function of PTPN2 and RC3H1 or a gene-regulating system capable of reducing the expression and/or function of PTPN2 and RC3H1 and further comprising a recombinant expression vector encoding a CAR or a recombinant TCR.

[0317] In some embodiments, the present disclosure provides methods of manufacturing modified TILs comprising reduced expression and/or function of ZC3H12A and RC3H or a gene-regulating system capable of reducing the expression and/or function of ZC3H12A and RC3H1 and further comprising a CAR or recombinant TCR expressed on the cell surface. In some embodiments, the modified TILs comprise reduced expression and/or function of ZC3H12A and RC3H1 or a gene-regulating system capable of reducing the expression and/or function of ZC3H12A and RC3H1 and further comprising a recombinant expression vector encoding a CAR or a recombinant TCR.

[0318] In some embodiments, the present disclosure provides methods of manufacturing modified TILs comprising reduced expression and/or function of SOCS1 and RC3H1 or a gene-regulating system capable of reducing the expression and/or function of SOCS1 and RC3H1 and further comprising a CAR or recombinant TCR expressed on the cell surface. In some embodiments, the modified TILs comprise reduced expression and/or function of SOCS1 and RC3H1 or a gene-regulating system capable of reducing the expression and/or function of SOCS1 and RC3H1 and further comprising a recombinant expression vector encoding a CAR or a recombinant TCR.

[0319] In some embodiments, the present disclosure provides methods of manufacturing modified TILs comprising reduced expression and/or function of CBLB and RC3H1 or a gene-regulating system capable of reducing the expression and/or function of CBLB and RC3H1 and further comprising a CAR or recombinant TCR expressed on the cell surface. In some embodiments, the modified TILs comprise reduced expression and/or function of CBLB and RC3H1 or a gene-regulating system capable of reducing the expression and/or function of CBLB and RC3H1 and further comprising a recombinant expression vector encoding a CAR or a recombinant TCR.

[0320] In some embodiments, the present disclosure provides methods of manufacturing modified TILs comprising reduced expression and/or function of PTPN2 and NFKBIA or a gene-regulating system capable of reducing the expression and/or function of PTPN2 and NFKBIA and further comprising a CAR or recombinant TCR expressed on the cell surface. In some embodiments, the modified TILs comprise reduced expression and/or function of PTPN2 and NFKBIA or a gene-regulating system capable of reducing the expression and/or function of PTPN2 and NFKBIA and further comprising a recombinant expression vector encoding a CAR or a recombinant TCR.

[0321] In some embodiments, the present disclosure provides methods of manufacturing modified TILs comprising reduced expression and/or function of ZC3H12A and NFKBIA or a gene-regulating system capable of reducing the expression and/or function of ZC3H12A and NFKBIA and further comprising a CAR or recombinant TCR expressed on the cell surface. In some embodiments, the modified TILs comprise reduced expression and/or function of ZC3H12A and NFKBIA or a gene-regulating system capable of reducing the expression and/or function of ZC3H12A and NFKBIA and further comprising a recombinant expression vector encoding a CAR or a recombinant TCR.

[0322] In some embodiments, the present disclosure provides methods of manufacturing modified TILs comprising reduced expression and/or function of SOCS1 and NFKBIA or a gene-regulating system capable of reducing the expression and/or function of SOCS1 and NFKBIA and further comprising a CAR or recombinant TCR expressed on the cell surface. In some embodiments, the modified TILs comprise reduced expression and/or function of SOCS1 and NFKBIA or a gene-regulating system capable of reducing the expression and/or function of SOCS1 and NFKBIA and further comprising a recombinant expression vector encoding a CAR or a recombinant TCR.

[0323] In some embodiments, the present disclosure provides methods of manufacturing modified TILs comprising reduced expression and/or function of CBLB and NFKBIA or a gene-regulating system capable of reducing the expression and/or function of CBLB and NFKBIA and further comprising a CAR or recombinant TCR expressed on the cell surface. In some embodiments, the modified TILs comprise reduced expression and/or function of CBLB and NFKBIA or a gene-regulating system capable of reducing the expression and/or function of CBLB and NFKBIA and further comprising a recombinant expression vector encoding a CAR or a recombinant TCR.

[0324] In some embodiments, the present disclosure provides methods of manufacturing modified TILs comprising reduced expression and/or function of RC3H and NFKBIA or a gene-regulating system capable of reducing the expression and/or function of RC3H and NFKBIA and further comprising a CAR or recombinant TCR expressed on the cell surface. In some embodiments, the modified TILs comprise reduced expression and/or function of RC3H1 and NFKBIA or a gene-regulating system capable of reducing the expression and/or function of RC3H and NFKBIA and further comprising a recombinant expression vector encoding a CAR or a recombinant TCR.

[0325] In some embodiments, the present disclosure provides methods of manufacturing modified TILs comprising a gene-regulating system capable of reducing the expression and/or function of one or more endogenous target genes. In some embodiments, these endogenous genes include ANKRD11, BCL2L11, BCL3, BCOR, CALM2, CBLB, CHIC2, CTLA4, DHODH, E2F8, EGR2, FLI1, FOXP3, GATA3, GNAS, HAVCR2, IKZF1, IKZF2, IKZF3, LAG3, MAP4K, NFKBIA, NR4A3, NRP1, PBRM1, PCBP1, PDCD1, PELI1, PIK3CD, PPP2R2D, PTPN1, PTPN2, PTPN22, PTPN6, RBM39, RC3H, SEMA7A, SERPINA3, SETD5, SH2B3, SH2D1A, SMAD2, SOCS1, TANK, TGFBR1, TGFBR2, TIGIT, TNFAIP3, TNIP1, TRAF6, UMPS, WDR6 and ZC3H12A. (See International Publication Nos. WO 2019/178422, WO 2019/178420 and WO 2019/178421, incorporated by reference herein in their entireties.)

[0326] In some embodiments, the present disclosure provides methods of manufacturing modified TILs comprising reduced expression and/or function of SOCS1 and PTPN2 or a gene-regulating system capable of reducing the expression and/or function of SOCS1 and PTPN2.

[0327] In some embodiments, the present disclosure provides methods of manufacturing modified TILs comprising reduced expression and/or function of SOCS1 and ZC3H12A or a gene-regulating system capable of reducing the expression and/or function of SOCS1 and ZC3H12A.

[0328] In some embodiments, the present disclosure provides methods of manufacturing modified TILs comprising reduced expression and/or function of PTPN2 and ZC3H12A or a gene-regulating system capable of reducing the expression and/or function of PTPN2 and ZC3H12A.

[0329] In some embodiments, the present disclosure provides methods of manufacturing modified TILs comprising reduced expression and/or function of PTPN2 and CBLB or a gene-regulating system capable of reducing the expression and/or function of PTPN2 and CBLB.

[0330] In some embodiments, the present disclosure provides methods of manufacturing modified TILs comprising reduced expression and/or function of ZC3H12A and CBLB or a gene-regulating system capable of reducing the expression and/or function of ZC3H12A and CBLB.

[0331] In some embodiments, the present disclosure provides methods of manufacturing modified TILs comprising reduced expression and/or function of SOCS1 and CBLB or a gene-regulating system capable of reducing the expression and/or function of SOCS1 and CBLB.

[0332] In some embodiments, the present disclosure provides methods of manufacturing modified TILs comprising reduced expression and/or function of PTPN2 and RC3H1 or a gene-regulating system capable of reducing the expression and/or function of PTPN2 and RC3H1.

[0333] In some embodiments, the present disclosure provides methods of manufacturing modified TILs comprising reduced expression and/or function of ZC3H12A and RC3H or a gene-regulating system capable of reducing the expression and/or function of ZC3H12A and RC3H1.

[0334] In some embodiments, the present disclosure provides methods of manufacturing modified TILs comprising reduced expression and/or function of SOCS1 and RC3H1 or a gene-regulating system capable of reducing the expression and/or function of SOCS1 and RC3H1.

[0335] In some embodiments, the present disclosure provides methods of manufacturing modified TILs comprising reduced expression and/or function of CBLB and RC3H1 or a gene-regulating system capable of reducing the expression and/or function of CBLB and RC3H1.

[0336] In some embodiments, the present disclosure provides methods of manufacturing modified TILs comprising reduced expression and/or function of PTPN2 and NFKBIA or a gene-regulating system capable of reducing the expression and/or function of PTPN2 and NFKBIA.

[0337] In some embodiments, the present disclosure provides methods of manufacturing modified TILs comprising reduced expression and/or function of ZC3H12A and NFKBIA or a gene-regulating system capable of reducing the expression and/or function of ZC3H12A and NFKBIA.

[0338] In some embodiments, the present disclosure provides methods of manufacturing modified TILs comprising reduced expression and/or function of SOCS1 and NFKBIA or a gene-regulating system capable of reducing the expression and/or function of SOCS1 and NFKBIA.

[0339] In some embodiments, the present disclosure provides methods of manufacturing modified TILs comprising reduced expression and/or function of CBLB and NFKBIA or a gene-regulating system capable of reducing the expression and/or function of CBLB and NFKBIA.

[0340] In some embodiments, the present disclosure provides methods of manufacturing modified TILs comprising reduced expression and/or function of RC3H and NFKBIA or a gene-regulating system capable of reducing the expression and/or function of RC3H and NFKBIA.

### Effector Functions

[0341] In some embodiments, the modified TILs manufactured by the methods described herein comprise reduced expression and/or function (or a gene-regulating system capable of reducing the expression and/or function) of one or more endogenous target genes selected from ANKRD11, BCL2L11, BCL3, BCOR, CALM2, CBLB, CHIC2, CTLA4, DHODH, E2F8, EGR2, FLI1, FOXP3, GATA3, GNAS, HAVCR2, IKZF1, IKZF2, IKZF3, LAG3, MAP4K, NFKBIA, NR4A3, NRP1, PBRM1, PCBP1, PDCD1, PELI1, PIK3CD, PPP2R2D, PTPN1, PTPN2, PTPN22, PTPN6, RBM39, RC3H, SEMA7A, SERPINA3, SETD5, SH2B3, SH2D1A, SMAD2, SOCS1, TANK, TGFBR1, TGFBR2, TIGIT, TNFAIP3, TNIP1, TRAF6, UMPS, WDR6 and ZC3H12A (See International Publication Nos. WO 2019/178422, WO 2019/178420 and WO 2019/178421, incorporated by reference herein in their entireties) and demonstrate an increase in one or more immune cell effector functions. In some embodiments, the modified TILs manufactured by the methods described herein comprise reduced expression and/or function (or a gene-regulating system capable of reducing the expression and/or function) of one or more endogenous target genes selected from SOCS1, PTPN2, ZC3H12A, CBLB, RC3H1 and NFKBIA and demonstrate an increase in one or more immune cell effector functions. Herein, the term “effector function” refers to functions of an immune cell related to the generation, maintenance, and/or enhancement of an immune response against a target cell or target antigen. In some embodiments, the modified TILs manufactured by the methods described herein demonstrate one or more of the following characteristics compared to an unmodified TIL: increased infiltration or migration in to a tumor, increased proliferation, increased or prolonged cell viability, increased resistance to inhibitory factors in the surrounding microenvironment such that the activation state of the cell is prolonged or increased, increased production of pro-inflammatory immune factors (e.g., pro-inflammatory cytokines, chemokines, and/or enzymes), increased cytotoxicity, increased resistance to exhaustion and/or increased percentage of T_{cm}.

[0342] In some embodiments, the modified TILs manufactured by the methods described herein demonstrate increased infiltration into a tumor compared to an unmodified TIL. In some embodiments, increased tumor infiltration by modified TILs refers to an increase the number of modified TILs infiltrating into a tumor during a given period of time compared to the number of unmodified TILs that infiltrate into a tumor during the same period of time. In some embodiments, the modified TILs demonstrate a 1.1, 1.2, 1.3, 1.4, 1.5, 1.6, 1.7, 1.8, 1.9, 2, 2.5, 3, 3.5, 4, 4.5, 5, 6, 7, 8, 9, 10, 15, 20, 25, 30, 35, 40, 45, 50, 60, 70, 80, 90, 100, or more fold increase in tumor filtration compared to an unmodified immune cell. Tumor infiltration can be measured by isolating one or more tumors from a subject and assessing the number of modified immune cells in the sample by flow cytometry, immunohistochemistry, and/or immunofluorescence.

[0343] In some embodiments, the modified TILs manufactured by the methods described herein demonstrate an increase in cell proliferation compared to an unmodified TIL. In these embodiments, the result is an increase in the number of modified TILs present compared to unmodified TILs after a given period of time. For example, in some embodiments, modified TILs demonstrate increased rates of proliferation compared to unmodified TILs, wherein the modified TILs divide at a more rapid rate than unmodified TILs. In some embodiments, the modified TILs demonstrate a 1.1, 1.2, 1.3, 1.4, 1.5, 1.6, 1.7, 1.8, 1.9, 2, 2.5, 3, 3.5, 4, 4.5, 5, 6, 7, 8, 9, 10, 15, 20, 25, 30, 35, 40, 45, 50, 60, 70, 80, 90, 100, or more fold increase in the rate of proliferation compared to an unmodified immune cell. In some embodiments, modified TILs demonstrate prolonged periods of proliferation compared to unmodified TILs, wherein the modified TILs and unmodified TILs divide at similar rates, but wherein the modified TILs maintain the proliferative state for a longer period of time. In some embodiments, the modified TILs maintain a proliferative state for 1.1, 1.2, 1.3, 1.4, 1.5, 1.6, 1.7, 1.8, 1.9, 2, 2.5, 3, 3.5, 4, 4.5, 5, 6, 7, 8, 9, 10, 15, 20, 25, 30, 35, 40, 45, 50, 60, 70, 80, 90, 100, or more times longer than an unmodified immune cell.

[0344] In some embodiments, the modified TILs manufactured by the methods described herein demonstrate increased or prolonged cell viability compared to an unmodified TIL. In such embodiments, the result is an increase in the number of modified TILs or present compared to unmodified TILs after a given period of time. For example, in some embodiments, modified TILs described herein remain viable and persist for 1.1, 1.2, 1.3, 1.4, 1.5, 1.6, 1.7, 1.8, 1.9, 2, 2.5, 3, 3.5, 4, 4.5, 5, 6, 7, 8, 9, 10, 15, 20, 25, 30, 35, 40, 45, 50, 60, 70, 80, 90, 100, or more times longer than an unmodified immune cell.

[0345] In some embodiments, the modified TILs manufactured by the methods described herein demonstrate increased resistance to inhibitory factors compared to an unmodified TIL. Exemplary inhibitory factors include signaling by immune checkpoint molecules (e.g., PD1, PDL1, CTLA4, LAG3, IDO) and/or inhibitory cytokines (e.g., IL-10, TGFβ).

[0346] In some embodiments, the modified T cells manufactured by the methods described herein demonstrate increased resistance to T cell exhaustion compared to an unmodified T cell. T cell exhaustion is a state of antigen-specific T cell dysfunction characterized by decreased effector function and leading to subsequent deletion of the antigen-specific T cells. In some embodiments, exhausted T cells lack the ability to proliferate in response to antigen, demonstrate decreased cytokine production, and/or demonstrate decreased cytotoxicity against target cells such as tumor cells. In some embodiments, exhausted T cells are identified by altered expression of cell surface markers and transcription factors, such as decreased cell surface expression of CD122 and CD127; increased expression of inhibitory cell surface markers such as PD1, LAG3, CD244, CD160, TIM3, and/or CTLA4; and/or increased expression of transcription factors such as Blimp1, NFAT, and/or BATF. In some embodiments, exhausted T cells demonstrate altered sensitivity cytokine signaling, such as increased sensitivity to TGFβ signaling and/or decreased sensitivity to IL-7 and IL-15 signaling. T cell exhaustion can be determined, for example, by co-culturing the T cells with a population of target cells and measuring T cell proliferation, cytokine production, and/or lysis of the target cells. In some embodiments, the modified TILs described herein are co-cultured with a population of target cells (e.g., autologous tumor cells or cell lines that have been engineered to express a target tumor antigen) and effector cell proliferation, cytokine production, and/or target cell lysis is measured. These results are then compared to the results obtained from co-culture of target cells with a control population of immune cells (such as unmodified TILs or immune effector cells that have a control modification).

[0347] In some embodiments, resistance to T cell exhaustion is demonstrated by increased production of one or more cytokines (e.g., IFNγ, TNFα, or IL-2) from the modified TILs compared to the cytokine production observed from the control population of immune cells. In some embodiments, a 1.1-, 1.2-, 1.3-, 1.4-, 1.5-, 1.6-, 1.7-, 1.8-, 1.9-, 2.0-, 2.5-, 3.0-, 3.5-, 4.0-, 4.5-, 5-, 6-, 7-, 8-, 9-, 10-, 15-, 20-, 30-, 35-, 40-, 45-, 50-, 60-, 70-, 80-, 90-, 100-fold increase (or more) in cytokine production from the modified TILs compared to the cytokine production from the control population of immune cells is indicative of an increased resistance to T cell exhaustion. In some embodiments, resistance to T cell exhaustion is demonstrated by increased proliferation of the modified TILs compared to the proliferation observed from the control population of immune cells. In some embodiments, a 1.1-, 1.2-, 1.3-, 1.4-, 1.5-, 1.6-, 1.7-, 1.8-, 1.9-, 2.0-, 2.5-, 3.0-, 3.5-, 4.0-, 4.5-, 5-, 6-, 7-, 8-, 9-, 10-, 15-, 20-, 30-, 35-, 40-, 45-, 50-, 60-, 70-, 80-, 90-, 100-fold increase (or more) in proliferation of the modified TILs compared to the proliferation of the control population of immune cells is indicative of an increased resistance to T cell exhaustion. In some embodiments, resistance to T cell exhaustion is demonstrated by increased target cell lysis by the modified TILs compared to the target cell lysis observed by the control population of immune cells. In some embodiments, a 1.1-, 1.2-, 1.3-, 1.4-, 1.5-, 1.6-, 1.7-, 1.8-, 1.9-, 2.0-, 2.5-, 3.0-, 3.5-, 4.0-, 4.5-, 5-, 6-, 7-, 8-, 9-, 10-, 15-, 20-, 30-, 35-, 40-, 45-, 50-, 60-, 70-, 80-, 90-, 100-fold increase (or more) in target cell lysis by the modified TILs compared to the target cell lysis by the control population of immune cells is indicative of an increased resistance to T cell exhaustion.

[0348] In some embodiments, exhaustion of the modified TILs compared to control populations of immune cells is measured during the in vitro or ex vivo manufacturing process. For example, in some embodiments, TILs isolated from tumor fragments are modified according to the methods described herein and then expanded in one or more rounds of expansion to produce a population of modified TILs. In such embodiments, the exhaustion of the modified TILs can be determined immediately after harvest and prior to a first round of expansion, after the first round of expansion but prior to a second round of expansion, and/or after the first and the second round of expansion. In some embodiments, exhaustion of the modified TILs compared to control populations of immune cells is measured at one or more time points after transfer of the modified TILs into a subject. For example, in some embodiments, the modified cells are produced according to the methods described herein and administered to a subject. Samples can then be taken from the subject at various time points after the transfer to determine exhaustion of the modified TILs in vivo over time.

[0349] In some embodiments, the modified TILs manufactured by the methods described herein demonstrate increased expression or production of pro-inflammatory immune factors compared to an unmodified TIL. Examples of pro-inflammatory immune factors include cytolytic factors, such as granzyme B, perforin, and granulysin; and pro-inflammatory cytokines such as interferons (IFNα, IFNβ, IFNγ), TNFα, IL-10, IL-12, IL-2, IL-17, CXCL8, and/or IL-6.

[0350] In some embodiments, the modified TILs manufactured by the methods described herein demonstrate increased cytotoxicity against a target cell compared to an unmodified TIL. In some embodiments, the modified TILs demonstrate a 1, 2, 3, 4, 5, 6, 7, 8, 9, 10, 20, 30, 40, 50, 60, 70, 80, 90, 100, or more fold increase in cytotoxicity against a target cell compared to an unmodified immune cell.

[0351] Assays for measuring immune effector function are known in the art. For example, tumor infiltration can be measured by isolating tumors from a subject and determining the total number and/or phenotype of the lymphocytes present in the tumor by flow cytometry, immunohistochemistry, and/or immunofluorescence. Cell-surface receptor expression can be determined by flow cytometry, immunohistochemistry, immunofluorescence, Western blot, and/or qPCR. Cytokine and chemokine expression and production can be measured by flow cytometry, immunohistochemistry, immunofluorescence, Western blot, ELISA, and/or qPCR. Responsiveness or sensitivity to extracellular stimuli (e.g., cytokines, inhibitory ligands, or antigen) can be measured by assaying cellular proliferation and/or activation of downstream signaling pathways (e.g., phosphorylation of downstream signaling intermediates) in response to the stimuli. Cytotoxicity can be measured by target-cell lysis assays known in the art, including in vitro or ex vivo co-culture of the modified TILs with target cells and in vivo murine tumor models, such as those described throughout the Examples.

### Regulation of Endogenous Pathways and Genes

[0352] In some embodiments, the modified TILs manufactured by the methods described herein demonstrate a reduced expression and/or function of one, two or more endogenous target genes selected from SOCS1, PTPN2, ZC3H12A, CBLB, RC3H and NFKBIA. Further details on the endogenous target genes are provided below in Table 3. In such embodiments, the reduced expression or function of the one, two or more endogenous target genes enhances one or more effector functions of the immune cell.

[0353] In some embodiments, the modified effector cells manufactured by the methods described herein comprise reduced expression and/or function of the Suppressors of cytokine signaling SOCS1 (SOCS1) gene. The SOCS1 protein comprises C-terminal SOCS box motifs, an SH2-domain, an ESS domain, and an N-terminal KIR domain. The 12 amino-acid residues called the kinase inhibitory region (KIR) has been found to be critical in the ability of SOCS1 to negatively regulate JAK1, TYK2 and JAK2 tyrosine kinase function.

[0354] In some embodiments, the modified effector cells manufactured by the methods described herein comprise reduced expression and/or function of the PTPN2 gene. The protein tyrosine phosphatase family (PTP) dephosphorylate phospho-tyrosine residues by their phosphatase catalytic domain. PTPN2 functions as a brake on both TCRs and cytokines, which signal through JAK/STAT signaling complexes, and thus serves as a checkpoint on both Signals 1 and 3. Following T Cell engagement with antigen and activation of the TCR, positive signals are amplified downstream by the kinases Lck and Fyn by phosphorylation of tyrosine residues. PTPN2 serves to dephosphorylate both Lck and Fyn and thus attenuate TCR signaling. In addition, following T cell encounter with cytokines and signaling through common γ chain receptor complex, which transmit positive signals though JAK/STAT signaling, PTPN2 also attenuates by dephosphorylation of STAT1 and STAT3. The sum functional impact of PTPN2 loss on T cell function is a lowering of the activation threshold needed for fulminant T cell activation through the TCR, and a hypersensitivity to growth and differentiation-enhancing cytokines.

[0355] In addition, deletion of PTPN2 in the whole mouse increases cytokine levels, lymphocytic infiltration in nonlymphoid tissues and early signs of rheumatoid arthritis-like symptoms; these mice do not survive past 5 weeks of age. Thus, PTPN2 has been identified as critical for postnatal development in mice. Consistent with this autoimmune phenotype, deletion of Ptpn2 in the T cell lineage from birth also results in an increase in lymphocytic infiltration in non-lymphoid tissues. Importantly, an inducible knockout of Ptpn2 in adult mouse T cells did not result in any autoimmune manifestations. Outside of its role in autoimmunity, Ptpn2 deletion was identified to associate with a small percentage of T cell acute lymphoblastic leukemia in humans (ALL), and to enhance skin tumor development in a two-stage chemically-induced carcinogenicity

[0356] In some embodiments, the modified effector cells manufactured by the methods described herein comprise reduced expression and/or function of the ZC3H12A gene. The ZC3H12A gene encodes Zc3h12, also referred to as MCPIP1 and Regnase-1, which is an RNase that possesses an RNAse domain just upstream of a CCCH-type zinc-finger motif. Through its nuclease activity, Zc3h12a targets and destabilizes the mRNAs of transcripts, such as IL-6, by binding a conserved stem loop structure within the 3′ UTR of these genes. In T cells, Zc3h12a controls the transcript levels of a number of pro-inflammatory genes, including c-Rel, Ox40 and IL-2. Regnase-1 activation is transient and is subject to negative feedback mechanisms including proteasome-mediated degradation or mucosa-associated lymphoid tissue 1 (MALT1) mediated cleavage. The deubiquitination activity of Regnase-1 promotes the cleavage of polyubiquitin chains, thus stabilizing protein targets that would otherwise be targeted for degradation. Regnase-1 deubiquitination of TNF receptor-associated factor (TRAF) members regulates JNK and NF-kappa B signaling pathways and is capable of stabilizing hypoxia-inducible factor-1A in conditions of cell stress. The major function of Regnase-1 is promoting mRNA decay via its ribonuclease activity by specifically targeting a subset of genes in different cell types. In monocytes, Regnase-1 downregulates IL-6 and IL-12B mRNAs, thus mitigating inflammation, whereas in T cells, it restricts T-cell activation by targeting c-Rel, Ox40 and IL-2 transcripts. In cancer cells, Regnase-1 promotes apoptosis by inhibiting anti-apoptotic genes including Bcl2L1, Bcl2A1, RelB and Bcl3.

[0357] In some embodiments, the modified effector cells manufactured by the methods described herein comprise reduced expression and/or function of the CBLB gene. This gene encodes CBL-B, also referred to as RNF56, Nbla00127 and Cbl proto-oncogene B. CBL-B is an E3 ubiquitin-protein ligase and a member of the CBL gene family. CBL-B functions as a negative regulator of T-cell activation. CBL-B expression in T cells causes ligand-induced T cell receptor down-modulation, controlling the activation degree of T cells during antigen presentation. Mutation of the CBLB gene has been associated with autoimmune conditions such as type 1 diabetes.

[0358] In some embodiments, the modified effector cells manufactured by the methods described herein comprise reduced expression and/or function of the RC3H1 gene. This gene encodes Ring finger and CCCH-type domains 1, also referred to as Roquin-1. Roquin-1 recognizes and binds to a constitutive decay element (CDE) in the 3′ UTR of mRNAs, leading to mRNA deadenylation and degradation. Alternative splicing results in multiple transcript variants.

[0359] In some embodiments, the modified effector cells manufactured by the methods described herein comprise reduced expression and/or function of the NFKBIA gene. This gene encodes IκBα, also referred to as NFKB inhibitor alpha, MAD-3, NFKBI and EDAID2. IκBα is one member of a family of cellular proteins that function to inhibit the NF-κB transcription factor. IκBα inhibits NF-κB by masking the nuclear localization signals (NLS) of NF-κB proteins and keeping them sequestered in an inactive state in the cytoplasm. In addition, IκBα blocks the ability of NF-κB transcription factors to bind to DNA, which is required for NF-κB's proper functioning. The NFKBIA gene is mutated in some Hodgkin's lymphoma cells; such mutations inactivate the IκBα protein, thus causing NF-κB to be chronically active in the lymphoma tumor cells and this activity contributes to the malignant state of these tumor cells.

TABLE 3
Endogenous target genes

| | | Human | Human | Murine | Murine |
|---|---|---|---|---|---|
| Gene | | UniProt | NCBI | UniProt | NCBI |
| Symbol | Gene Name | Ref. | Ref | Ref. | Ref |
| SOCS1 | suppressor of | O15524 | 8651 | O35716 | 12703 |
| | cytokine | | (SEQ ID NO: 1) | | (SEQ ID NO: 2) |
| | signaling 1 | | | | |
| PTPN2 | protein tyrosine | P17706 | 5771 | Q06180 | 19255 |
| | phosphatase, | | (SEQ ID NO: 3) | | (SEQ ID NO: 4) |
| | non-receptor | | | | |
| | type 2 | | | | |
| ZC3H12A | Endoribonuclease | Q5D1E8 | 80149 | Q5D1E7 | 230738 |
| | ZC3H12A | | (SEQ ID NO: 5) | | (SEQ ID NO: 6) |
| CBLB | Cbl proto- | Q13191 | 868 | Q3TTA7 | 208650 |
| | oncogene B | | (SEQ ID NO: 7) | | (SEQ ID NO: 8) |
| RC3H1 | Ring finger and | Q5TC82 | 149041 | Q4VGL6 | 381305 |
| | CCCH-type | | (SEQ ID NO: 9) | | (SEQ ID NO: 10) |
| | domains 1 | | | | |
| NFKBIA | NFKB inhibitor | P25963 | 4792 | Q9Z1E3 | 18035 |
| | alpha | | (SEQ ID NO: 11) | | (SEQ ID NO: 12) |

[0360] In some embodiments, the modified TILs comprise reduced expression and/or function of any one or two or more of SOCS1, PTPN2, ZC3H12A, CBLB, RC3H1 or NFKBIA. In some embodiments, the modified TILs comprise reduced expression and/or function of at least one endogenous target gene selected from SOCS1, PTPN2, ZC3H12A, RC3H1 and NFKBIA and further comprise reduced expression and/or function of CBLB. In some embodiments, the modified TILs comprise reduced expression and/or function of at least two endogenous target genes selected from SOCS1, PTPN2, ZC3H12A, RC3H1 and NFKBIA and further comprise reduced expression and/or function of CBLB.

[0361] In some embodiments, the modified TILs comprise reduced expression and/or function of at least one endogenous target gene selected from CBLB, PTPN2, ZC3H12A, RC3H1 and NFKBIA and further comprise reduced expression and/or function of SOCS1. In some embodiments, the modified TILs comprise reduced expression and/or function of at least two endogenous target genes selected from CBLB, PTPN2, ZC3H12A, RC3H1 and NFKBIA and further comprise reduced expression and/or function of SOCS1.

[0362] In some embodiments, the modified TILs comprise reduced expression and/or function of at least one endogenous target gene selected from CBLB, SOCS1, ZC3H12A, RC3H1 and NFKBIA and further comprise reduced expression and/or function of PTPN2. In some embodiments, the modified TILs comprise reduced expression and/or function of at least two endogenous target genes selected from CBLB, SOCS1, ZC3H12A, RC3H and NFKBIA and further comprise reduced expression and/or function of PTPN2.

[0363] In some embodiments, the modified TILs comprise reduced expression and/or function of at least one endogenous target gene selected from CBLB, SOCS1, PTPN2, RC3H and NFKBIA and further comprise reduced expression and/or function of ZC3H12A. In some embodiments, the modified TILs comprise reduced expression and/or function of at least two endogenous target genes selected from CBLB, SOCS1, PTPN2, RC3H and NFKBIA and further comprise reduced expression and/or function of ZC3H12A.

[0364] In some embodiments, the modified TILs comprise reduced expression and/or function of at least one endogenous target gene selected from CBLB, SOCS1, PTPN2, ZC3H12A and NFKBIA and further comprise reduced expression and/or function of RC3H1. In some embodiments, the modified TILs comprise reduced expression and/or function of at least two endogenous target genes selected from CBLB, SOCS1, PTPN2, ZC3H12A and NFKBIA and further comprise reduced expression and/or function of RC3H.

[0365] In some embodiments, the modified TILs comprise reduced expression and/or function of at least one endogenous target gene selected from CBLB, SOCS1, PTPN2, ZC3H12A and RC3H1 and further comprise reduced expression and/or function of NFKBIA. In some embodiments, the modified TILs comprise reduced expression and/or function of at least two endogenous target genes selected from CBLB, SOCS1, PTPN2, ZC3H12A and RC3H1 and further comprise reduced expression and/or function of NFKBIA.

### Gene-Regulating Systems

[0366] Herein, the term “gene-regulating system” refers to a protein, nucleic acid, or combination thereof that is capable of modifying an endogenous target DNA sequence when introduced into a cell, thereby regulating the expression or function of the encoded gene product. Numerous gene regulating systems suitable for use in the methods of the present disclosure are known in the art including, but not limited to, shRNAs, siRNAs, zinc-finger nuclease systems, TALEN systems, and CRISPR/Cas systems. Gene regulating systems comprise gene editing systems including zinc-finger nuclease systems, TALEN systems, and CRISPR/Cas systems. In some embodiments, the gene-regulating system is a gene-editing system. Gene editing systems suitable for use in the methods of the present disclosure are known in the art including, but not limited to, zinc-finger nuclease systems, TALEN systems, and CRISPR/Cas systems.

[0367] As used herein, “regulate,” when used in reference to the effect of a gene-regulating system on an endogenous target gene encompasses any change in the sequence of the endogenous target gene, any change in the epigenetic state of the endogenous target gene, and/or any change in the expression or function of the protein encoded by the endogenous target gene.

[0368] In some embodiments, the gene-regulating system may mediate a change in the sequence of the endogenous target gene, for example, by introducing one or more mutations into the endogenous target sequence, such as by insertion or deletion of one or more nucleic acids in the endogenous target sequence. Exemplary mechanisms that can mediate alterations of the endogenous target sequence include, but are not limited to, non-homologous end joining (NHEJ) (e.g., classical or alternative), microhomology-mediated end joining (MMEJ), homology-directed repair (e.g., endogenous donor template mediated), SDSA (synthesis dependent strand annealing), single strand annealing or single strand invasion.

[0369] In some embodiments, the gene-regulating system may mediate a change in the epigenetic state of the endogenous target sequence. For example, in some embodiments, the gene-regulating system may mediate covalent modifications of the endogenous target gene DNA (e.g., cytosine methylation and hydroxymethylation) or of associated histone proteins (e.g., lysine acetylation, lysine and arginine methylation, serine and threonine phosphorylation, and lysine ubiquitination and sumoylation).

[0370] In some embodiments, the gene-regulating system may mediate a change in the expression of the protein encoded by the endogenous target gene. In such embodiments, the gene-regulating system may regulate the expression of the encoded protein by modifications of the endogenous target DNA sequence, or by acting on the mRNA product encoded by the DNA sequence. In some embodiments, the gene-regulating system may result in the expression of a modified endogenous protein. In such embodiments, the modifications to the endogenous DNA sequence mediated by the gene-regulating system result in the expression of an endogenous protein demonstrating a reduced function as compared to the corresponding endogenous protein in an unmodified TIL. In such embodiments, the expression level of the modified endogenous protein may be increased, decreased or may be the same, or substantially similar to, the expression level of the corresponding endogenous protein in an unmodified immune cell.

### Nucleic Acid-Based Gene-Regulating Systems

[0371] In some embodiments, the present disclosure provides nucleic acid gene-regulating systems comprising one, two or more nucleic acids capable of reducing the expression and/or function of at least one, two, or more endogenous gene selected from ANKRD11, BCL2L11, BCL3, BCOR, CALM2, CBLB, CHIC2, CTLA4, DHODH, E2F8, EGR2, FLI1, FOXP3, GATA3, GNAS, HAVCR2, IKZF1, IKZF2, IKZF3, LAG3, MAP4K, NFKBIA, NR4A3, NRP1, PBRM1, PCBP1, PDCD1, PELI1, PIK3CD, PPP2R2D, PTPN1, PTPN2, PTPN22, PTPN6, RBM39, RC3H1, SEMA7A, SERPINA3, SETD5, SH2B3, SH2D1A, SMAD2, SOCS1, TANK, TGFBR1, TGFBR2, TIGIT, TNFAIP3, TNIP1, TRAF6, UMPS, WDR6 and ZC3H12A. (See International Publication Nos. WO 2019/178422, WO 2019/178420 and WO 2019/178421, incorporated by reference herein in their entireties.) In some embodiments, the present disclosure provides nucleic acid gene-regulating systems comprising one, two or more nucleic acids capable of reducing the expression and/or function of at least one endogenous gene selected from SOCS1, PTPN2, ZC3H12A, CBLB, RC3H1 and NFKBIA. In some embodiments, the present disclosure provides nucleic acid gene-regulating systems comprising nucleic acids capable of reducing the expression and/or function of SOCS1 and at least one, two or more endogenous target genes selected from PTPN2, ZC3H12A, CBLB, RC3H1, and NFKBIA. In some embodiments, the present disclosure provides modified TILs manufactured by the methods described herein comprising such gene-regulating systems. As used herein, a nucleic acid-based gene-regulating system is a system comprising one or more nucleic acid molecules that is capable of regulating the expression of an endogenous target gene without the requirement for an exogenous protein. In some embodiments, the gene-regulating system comprises an RNA interference molecule or antisense RNA molecule that is complementary to a target nucleic acid sequence.

[0372] An “antisense RNA molecule” refers to an RNA molecule, regardless of length, that is complementary to an mRNA transcript. Antisense RNA molecules refer to single stranded RNA molecules that can be introduced to a cell, tissue, or subject and result in decreased expression of an endogenous target gene product through mechanisms that do not rely on endogenous gene silencing pathways, but rather rely on RNaseH-mediated degradation of the target mRNA transcript. In some embodiments, an antisense nucleic acid comprises a modified backbone, for example, phosphorothioate, phosphorodithioate, or others known in the art, or may comprise non-natural internucleoside linkages. In some embodiments, an antisense nucleic acid can comprise locked nucleic acids (LNA).

[0373] “RNA interference molecule” as used herein refers to an RNA polynucleotide that mediates the decreased the expression of an endogenous target gene product by degradation of a target mRNA through endogenous gene silencing pathways (e.g., Dicer and RNA-induced silencing complex (RISC)). Exemplary RNA interference agents include micro RNAs (also referred to herein as “miRNAs”), short hairpin RNAs (shRNAs), small interfering RNAs (siRNAs), RNA aptamers, and morpholinos.

[0374] In some embodiments, the gene-regulating system comprises one or more miRNAs. miRNAs are naturally occurring, small non-coding RNA molecules of about 21-25 nucleotides in length. miRNAs are at least partially complementary to one or more target mRNA molecules. miRNAs can downregulate (e.g., decrease) expression of an endogenous target gene product through translational repression, cleavage of the mRNA, and/or deadenylation.

[0375] In some embodiments, the gene-regulating system comprises one or more shRNAs. shRNAs are single stranded RNA molecules of about 50-70 nucleotides in length that form stem-loop structures and result in degradation of complementary mRNA sequences. shRNAs can be cloned in plasmids or in non-replicating recombinant viral vectors to be introduced intracellularly and result in the integration of the shRNA-encoding sequence into the genome. As such, an shRNA can provide stable and consistent repression of endogenous target gene translation and expression.

[0376] In some embodiments, nucleic acid-based gene-regulating system comprises one or more siRNAs. siRNAs refer to double stranded RNA molecules typically about 21-23 nucleotides in length. The siRNA associates with a multi protein complex called the RNA-induced silencing complex (RISC), during which the “passenger” sense strand is enzymatically cleaved. The antisense “guide” strand contained in the activated RISC then guides the RISC to the corresponding mRNA because of sequence homology and the same nuclease cuts the target mRNA, resulting in specific gene silencing. Optimally, an siRNA is 18, 19, 20, 21, 22, 23 or 24 nucleotides in length and has a 2-base overhang at its 3′ end. siRNAs can be introduced to an individual cell and/or culture system and result in the degradation of target mRNA sequences. siRNAs and shRNAs are further described in Fire et al., Nature, 391:19, 1998 and U.S. Pat. Nos. 7,732,417; 8,202,846; and 8,383,599.

[0377] In some embodiments, the gene-regulating system comprises one or more morpholinos. “Morpholino” as used herein refers to a modified nucleic acid oligomer wherein standard nucleic acid bases are bound to morpholine rings and are linked through phosphorodiamidate linkages. Similar to siRNA and shRNA, morpholinos bind to complementary mRNA sequences. However, morpholinos function through steric inhibition of mRNA translation and alteration of mRNA splicing rather than targeting complementary mRNA sequences for degradation.

[0378] In some embodiments, the gene-regulating system comprises a nucleic acid molecule that binds to a target RNA sequence that is at least 90% identical to an RNA sequence encoded by a DNA sequence defined by a set of genomic coordinates shown in Tables 4, 5, 9-12, and 17-22. Throughout this application, the referenced genomic coordinates are based on genomic annotations in the GRCh38 (also referred to as hg38) assembly of the human genome from the Genome Reference Consortium, available at the National Center for Biotechnology Information website. Tools and methods for converting genomic coordinates between one assembly and another are known in the art and can be used to convert the genomic coordinates provided herein to the corresponding coordinates in another assembly of the human genome, including conversion to an earlier assembly generated by the same institution or using the same algorithm (e.g., from GRCh38 to GRCh37), and conversion an assembly generated by a different institution or algorithm (e.g., from GRCh38 to NCBI33, generated by the International Human Genome Sequencing Consortium). Available methods and tools known in the art include, but are not limited to, NCBI Genome Remapping Service, available at the National Center for Biotechnology Information website, UCSC LiftOver, available at the UCSC Genome Brower website, and Assembly Converter, available at the Ensembl.org website.

[0379] In some embodiments, the nucleic acid-based gene-regulating system comprises at least one nucleic acid molecule (e.g., an siRNA, an shRNA, an RNA aptamer, or a morpholino), wherein the at least one nucleic acid molecule is a SOCS1-targeting nucleic acid molecule. In some embodiments, the at least one SOCS1-targeting nucleic acid molecule binds to a target RNA sequence that is at least 95%, 96%, 97%, 98%, or 99% identical to an RNA sequence encoded by the SOCS1 gene (SEQ ID NO: 1) or the Socs1 gene (SEQ ID NO: 2). In some embodiments, the at least one SOCS1-targeting nucleic acid molecule binds to a target RNA sequence that is 100% identical to an RNA sequence encoded by the SOCS1 gene (SEQ ID NO: 1) or the Socs1 gene (SEQ ID NO: 2). In some embodiments, the at least one SOCS1-targeting nucleic acid molecule is an siRNA or an shRNA molecule. In some embodiments, the at least one SOCS1-targeting siRNA or an shRNA molecule binds to a target RNA sequence that is at least 95%, 96%, 97%, 98%, or 99% identical to an RNA sequence encoded by the SOCS1 gene (SEQ ID NO: 1) or the Socs1 gene (SEQ ID NO: 2). In some embodiments, the at least one SOCS1-targeting siRNA or an shRNA molecule binds to a target RNA sequence that is 100% identical to an RNA sequence encoded by the SOCS1 gene (SEQ ID NO: 1) or the Socs1 gene (SEQ ID NO: 2).

[0380] In some embodiments, the at least one SOCS1-targeting nucleic acid molecule binds to a target RNA sequence that is at least 95%, 96%, 97%, 98%, or 99% identical to an RNA sequence encoded by a DNA sequence defined by a set of genomic coordinates shown in Table 4 (human genome) or Table 5 (mouse genome). In some embodiments, the at least one SOCS1-targeting nucleic acid molecule binds to a target RNA sequence that is 100% identical to an RNA sequence encoded by a DNA sequence defined by a set of genomic coordinates shown in Table 4 or Table 5. In some embodiments, the at least one SOCS1-targeting nucleic acid molecule binds to a target RNA sequence that is at least 95%, 96%, 97%, 98%, or 99% identical to an RNA sequence encoded by one of SEQ ID NOs: 23-200. In some embodiments, the at least one SOCS1-targeting nucleic acid molecule binds to a human target RNA sequence that is at least 95%, 96%, 97%, 98%, or 99% identical to a human RNA sequence encoded by one of SEQ ID NOs: 23-35 and 56-187. In some embodiments, the at least one SOCS1-targeting nucleic acid molecule binds to a target RNA sequence that is 100% identical to an RNA sequence encoded by one of SEQ ID NOs: 23-200. In some embodiments, the at least one SOCS1-targeting nucleic acid molecule binds to a target human RNA sequence that is 100% identical to a human RNA sequence encoded by one of SEQ ID NOs: 23-35 and 56-187.

[0381] In some embodiments, the at least one SOCS1-targeting nucleic acid molecule is a SOCS1-targeting shRNA or siRNA molecule. In some embodiments, the at least one SOCS1-targeting shRNA or siRNA molecule binds to a target RNA sequence that is at least 95%, 96%, 97%, 98%, or 99% identical to an RNA sequence encoded by a DNA sequence defined by a set of genomic coordinates shown in Table 4 or Table 5. In some embodiments, the at least one SOCS1-targeting shRNA or siRNA molecule binds to a target RNA sequence that is 100% identical to an RNA sequence encoded by a DNA sequence defined by a set of genomic coordinates shown in Table 4 or Table 5. In some embodiments, the at least one SOCS1-targeting shRNA or siRNA molecule binds to a target RNA sequence that is at least 95%, 96%, 97%, 98%, or 99% identical to an RNA sequence encoded by one of SEQ ID NOs: 23-55 or 23-200. In some embodiments, the at least one SOCS1-targeting shRNA or siRNA molecule binds to a target human RNA sequence that is at least 95%, 96%, 97%, 98%, or 99% identical to a human RNA sequence encoded by one of SEQ ID NOs: 23-35 and 56-187. In some embodiments, the at least one SOCS1-targeting shRNA or siRNA molecule binds to a target RNA sequence that is 100% identical to an RNA sequence encoded by one of SEQ ID NOs: 23-55 or 23-200. In some embodiments, the at least one SOCS1-targeting shRNA or siRNA molecule binds to a target human RNA sequence that is 100% identical to a human RNA sequence encoded by one of SEQ ID NOs: 23-35 and 56-187.

[0382] In some embodiments, the nucleic acid-based gene-regulating system comprises at least one SOCS1-targeting siRNA molecule or shRNA molecule selected from those known in the art. For example, in some embodiments, the SOCS1-targeting nucleic acid molecule is a SOCS1-targeting siRNA comprising a nucleic acid sequence selected from SEQ ID NOs: 13-22. (See International PCT Publication Nos. WO 2017120996; WO 2018137295; WO 2017120998; and WO 2018137293, incorporated by reference herein in their entireties) (Table 6). In some embodiments, the SOCSC-targeting siRNA molecule or shRNA molecule is encoded by a nucleic acid sequence selected from SEQ ID NOs: 13-200. In some embodiments, the SOCS1-targeting siRNA molecule or shRNA molecule is encoded by a human nucleic acid sequence selected from SEQ ID NOs: 23-35 and 56-187. In some embodiments, the SOCS-targeting nucleic acid molecule is a SOCSh-targeting shRNA molecule or siRNA molecule that binds to a human target sequence selected from SEQ ID NOs: 23-35 (See U.S. Pat. No. 8,324,369, incorporated herein by reference in its entirety) (Table 7). In some embodiments, the SOCS1-targeting nucleic acid molecule is a SOCSh-targeting shRNA molecule or siRNA molecule that binds to a mouse target sequence selected from SEQ ID NOs: 36-55 (See U.S. Pat. No. 9,944,931, incorporated by reference herein in its entirety) (Table 8).

TABLE 4
SOCS1 Human Genome Coordinates

| Target | Coordinates | Target | Coordinates |
|---|---|---|---|
| SOCS1 | chr16: 11255187-11255206 | SOCS1 | chr16: 11254923-11254942 |
| SOCS1 | chr16: 11255238-11255257 | SOCS1 | chr16: 11255431-11255450 |
| SOCS1 | chr16: 11255058-11255077 | SOCS1 | chr16: 11255463-11255482 |
| SOCS1 | chr16: 11255158-11255177 | SOCS1 | chr16: 11255343-11255362 |
| SOCS1 | chr16: 11255239-11255258 | SOCS1 | chr16: 11255088-11255107 |
| SOCS1 | chr16: 11255237-11255256 | SOCS1 | chr16: 11254834-11254853 |
| SOCS1 | chr16: 11255019-11255038 | SOCS1 | chr16: 11254922-11254941 |
| SOCS1 | chr16: 11255066-11255085 | SOCS1 | chr16: 11255098-11255117 |
| SOCS1 | chr16: 11255238-11255257 | SOCS1 | chr16: 11254993-11255012 |
| SOCS1 | chr16: 11255168-11255187 | SOCS1 | chr16: 11254840-11254859 |
| SOCS1 | chr16: 11255079-11255098 | SOCS1 | chr16: 11255400-11255419 |
| SOCS1 | chr16: 11255287-11255306 | SOCS1 | chr16: 11254920-11254939 |
| SOCS1 | chr16: 11255249-11255268 | SOCS1 | chr16: 11254966-11254985 |
| SOCS1 | chr16: 11255186-11255205 | SOCS1 | chr16: 11254860-11254879 |
| SOCS1 | chr16: 11255236-11255255 | SOCS1 | chr16: 11254980-11254999 |
| SOCS1 | chr16: 11255116-11255135 | SOCS1 | chr16: 11254857-11254876 |
| SOCS1 | chr16: 11255070-11255089 | SOCS1 | chr16: 11254874-11254893 |
| SOCS1 | chr16: 11255117-11255136 | SOCS1 | chr16: 11255028-11255047 |
| SOCS1 | chr16: 11255283-11255302 | SOCS1 | chr16: 11254956-11254975 |
| SOCS1 | chr16: 11255442-11255461 | SOCS1 | chr16: 11254908-11254927 |
| SOCS1 | chr16: 11255209-11255228 | SOCS1 | chr16: 11255337-11255356 |
| SOCS1 | chr16: 11254932-11254951 | SOCS1 | chr16: 11254836-11254855 |
| SOCS1 | chr16: 11254966-11254985 | SOCS1 | chr16: 11254842-11254861 |
| SOCS1 | chr16: 11254950-11254969 | SOCS1 | chr16: 11254865-11254884 |
| SOCS1 | chr16: 11255049-11255068 | SOCS1 | chr16: 11254830-11254849 |
| SOCS1 | chr16: 11255155-11255174 | SOCS1 | chr16: 11255401-11255420 |
| SOCS1 | chr16: 11255460-11255479 | SOCS1 | chr16: 11254864-11254883 |
| SOCS1 | chr16: 11255037-11255056 | SOCS1 | chr16: 11255311-11255330 |
| SOCS1 | chr16: 11255154-11255173 | SOCS1 | chr16: 11255343-11255362 |
| SOCS1 | chr16: 11255115-11255134 | SOCS1 | chr16: 11255342-11255361 |
| SOCS1 | chr16: 11254985-11255004 | SOCS1 | chr16: 11255272-11255291 |
| SOCS1 | chr16: 11255013-11255032 | SOCS1 | chr16: 11254866-11254885 |
| SOCS1 | chr16: 11255016-11255035 | SOCS1 | chr16: 11255310-11255329 |
| SOCS1 | chr16: 11255139-11255158 | SOCS1 | chr16: 11255336-11255355 |
| SOCS1 | chr16: 11255248-11255267 | SOCS1 | chr16: 11255416-11255435 |
| SOCS1 | chr16: 11255217-11255236 | SOCS1 | chr16: 11255402-11255421 |
| SOCS1 | chr16: 11254994-11255013 | SOCS1 | chr16: 11255467-11255486 |
| SOCS1 | chr16: 11254965-11254984 | SOCS1 | chr16: 11254873-11254892 |
| SOCS1 | chr16: 11255219-11255238 | SOCS1 | chr16: 11255265-11255284 |
| SOCS1 | chr16: 11255173-11255192 | SOCS1 | chr16: 11254820-11254839 |
| SOCS1 | chr16: 11255210-11255229 | SOCS1 | chr16: 11254848-11254867 |
| SOCS1 | chr16: 11255062-11255081 | SOCS1 | chr16: 11255317-11255336 |
| SOCS1 | chr16: 11255259-11255278 | SOCS1 | chr16: 11255351-11255370 |
| SOCS1 | chr16: 11255230-11255249 | SOCS1 | chr16: 11254811-11254830 |
| SOCS1 | chr16: 11255084-11255103 | SOCS1 | chr16: 11255353-11255372 |
| SOCS1 | chr16: 11255175-11255194 | SOCS1 | chr16: 11255350-11255369 |
| SOCS1 | chr16: 11255419-11255438 | SOCS1 | chr16: 11255309-11255328 |
| SOCS1 | chr16: 11254903-11254922 | SOCS1 | chr16: 11255390-11255409 |
| SOCS1 | chr16: 11255089-11255108 | SOCS1 | chr16: 11255478-11255497 |
| SOCS1 | chr16: 11255379-11255398 | SOCS1 | chr16: 11255330-11255349 |
| SOCS1 | chr16: 11255206-11255225 | SOCS1 | chr16: 11254875-11254894 |
| SOCS1 | chr16: 11255090-11255109 | SOCS1 | chr16: 11255124-11255143 |
| SOCS1 | chr16: 11255208-11255227 | SOCS1 | chr16: 11255352-11255371 |
| SOCS1 | chr16: 11254956-11254975 | SOCS1 | chr16: 11254872-11254891 |
| SOCS1 | chr16: 11255118-11255137 | SOCS1 | chr16: 11255331-11255350 |
| SOCS1 | chr16: 11254906-11254925 | SOCS1 | chr16: 11255315-11255334 |
| SOCS1 | chr16: 11255167-11255186 | SOCS1 | chr16: 11255482-11255501 |
| SOCS1 | chr16: 11254835-11254854 | SOCS1 | chr16: 11254995-11255014 |
| SOCS1 | chr16: 11255292-11255311 | SOCS1 | chr16: 11255316-11255335 |
| SOCS1 | chr16: 11255416-11255435 | SOCS1 | chr16: 11255308-11255327 |
| SOCS1 | chr16: 11255136-11255155 | SOCS1 | chr16: 11255321-11255340 |
| SOCS1 | chr16: 11254964-11254983 | SOCS1 | chr16: 11255322-11255341 |
| SOCS1 | chr16: 11254896-11254915 | SOCS1 | chr16: 11255330-11255349 |
| SOCS1 | chr16: 11254940-11254959 | SOCS1 | chr16: 11255368-11255387 |
| SOCS1 | chr16: 11255349-11255368 | SOCS1 | chr16: 11255377-11255396 |
| SOCS1 | chr16: 11254992-11255011 | SOCS1 | chr16: 11255380-11255399 |

TABLE 5
Socs1 Murine Genome Coordinates

| Target | Coordinates |
|---|---|
| Socs1 | chr16: 10784479-10784498 |
| Socs1 | chr16: 10784409-10784428 |
| Socs1 | chr16: 10784456-10784475 |
| Socs1 | chr16: 10784322-10784341 |
| Socs1 | chr16: 10784548-10784567 |
| Socs1 | chr16: 10784596-10784615 |
| Socs1 | chr16: 10784264-10784283 |
| Socs1 | chr16: 10784628-10784647 |
| Socs1 | chr16: 10784526-10784545 |
| Socs1 | chr16: 10784508-10784527 |
| Socs1 | chr16: 10784565-10784584 |
| Socs1 | chr16: 10784474-10784493 |
| Socs1 | chr16: 10784293-10784312 |

TABLE 6
Exemplary human SOCS1 siRNAs

| | | SEQ |
|---|---|---|
| Target | Sequence | ID |
| SOCS1_siRNA_1 | CGCACUUCCGCACAUUCCGUUCG | 13 |
| SOCS1_siRNA_2 | GGGGAGGGUCUCUGGCUUUAUUU | 14 |
| SOCS1_siRNA_3 | CAGCAUUAACUGGGAUGCCGUGU | 15 |
| SOCS1_siRNA_4 | CCAGGACCUGAACUCGCACCUCC | 16 |
| SOCS1_siRNA_5 | UACAUAUACCCAGUAUCUUUGCA | 17 |
| SOCS1_siRNA_6 | GCCGACAAUGCAGUCUCCACAGC | 18 |
| SOCS1_siRNA_7 | CCCCUGGUUGUUGUAGCAGCUUA | 19 |
| SOCS1_siRNA_8 | CUGCUGUGCAGAAUCCUAUUUUA | 20 |
| SOCS1_siRNA_9 | UGGGAUGCCGUGUUAUUUUGUUA | 21 |
| SOCS1_siRNA_10 | UCGCACCUCCUACCUCUUCAUGU | 22 |

TABLE 7
Exemplary human SOCS1 shRNA and siRNA target
sequences

| | | SEQ |
|---|---|---|
| Target | Sequence | ID |
| SOCS1_shRNA_1 | CACGCACTTCCGCACATTC | 23 |
| SOCS1_shRNA_2 | TTCCGTTCGCACGCCGATT | 24 |
| SOCS1_shRNA_3 | GAGCTTCGACTGCCTCTTC | 25 |
| SOCS1_siRNA_l | CGCACTTCCGCACATTCCGTTCG | 26 |
| SOCS1_siRNA_2 | GGGGAGGGTCTCTGGCTTTATTT | 27 |
| SOCS1_siRNA_3 | CAGCATTAACTGGGATGCCGTGT | 28 |
| SOCS1_siRNA_4 | CCAGGACCTGAACTCGCACCTCC | 29 |
| SOCS1_siRNA_5 | TACATATACCCAGTATCTTTGCA | 30 |
| SOCS1_siRNA_6 | GCCGACAATGCAGTCTCCACAGC | 31 |
| SOCS1_siRNA_7 | CCCCTGGTTGTTGTAGCAGCTTA | 32 |
| SOCS1_siRNA_8 | CTGCTGTGCAGAATCCTATTTTA | 33 |
| SOCS1_siRNA_9 | TGGGATGCCGTGTTATTTTGTTA | 34 |
| SOCS1_siRNA_10 | TCGCACCTCCTACCTCTTCATGT | 35 |

TABLE 8
Exemplary murine Socsl shRNA and siRNA
target sequences

| | | SEQ |
|---|---|---|
| Target | Sequence | ID |
| ND000214 | TTTCGAGCTGCTGGAGCACTA | 36 |
| ND000219 | TCGAGCTGCTGGAGCACTACG | 37 |
| TRCN0000231240 | TCGCCAACGGAACTGCTTCTT | 38 |
| ND000218 | ACTTCTGGCTGGAGACCTCAT | 39 |
| TRCN0000067420 | GCGAGACCTTCGACTGCCTTT | 40 |
| TRCN0000067418 | CGACACTCACTTCCGCACCTT | 41 |
| ND000220 | CTACCTGAGTTCCTTCCCCTT | 42 |
| TRCN0000231238 | TTCCGCTCCCACTCCGATTAC | 43 |
| TRCN0000231241 | TAACCCGGTACTCCGTGACTA | 44 |
| ND000216 | TACTCCGTGACTACCTGAGTT | 45 |
| ND000211 | CTTCCGCTCCCACTCCGATTA | 46 |
| TRCN0000067422 | GCGCGACAGTCGCCAACGGAA | 47 |
| TRCN0000231239 | TGGACGCCTGCGGCTTCTATT | 48 |
| TRCN0000067419 | CGCATCCCTCTTAACCCGGTA | 49 |
| ND000212 | TACATATTCCCAGTATCTTTG | 50 |
| TRCN0000231242 | GCGCCTTATTATTTCTTATTA | 51 |
| TRCN0000067421 | CCGTGACTACCTGAGTTCCTT | 52 |
| ND000215 | GGAGGGTCTCTGGCTTCATTT | 53 |
| ND000213 | TTCGCGCTCAGCGTGAAGATG | 54 |
| ND000217 | ATCCCTCTTAACCCGGTACTC | 55 |

[0383] In some embodiments, the nucleic acid-based gene-regulating system comprises at least one nucleic acid molecule (e.g., an siRNA, an shRNA, an RNA aptamer, or a morpholino), wherein the at least one nucleic acid molecule is a PTPN2-targeting nucleic acid molecule. In some embodiments, the at least one PTPN2-targeting nucleic acid molecule binds to a target RNA sequence that is at least 95%, 96%, 97%, 98%, or 99% identical to an RNA sequence encoded by the PTPN2 gene (SEQ ID NO: 3) or the Ptpn2 gene (SEQ ID NO: 4). In some embodiments, the at least one PTPN2-targeting nucleic acid molecule binds to a target RNA sequence that is 100% identical to an RNA sequence encoded by the PTPN2 gene (SEQ ID NO: 3) or the Ptpn2 gene (SEQ ID NO: 4). In some embodiments, the at least one PTPN2-targeting nucleic acid molecule is an siRNA or an shRNA molecule. In some embodiments, the at least one PTPN2-targeting siRNA or an shRNA molecule binds to a target RNA sequence that is at least 95%, 96%, 97%, 98%, or 99% identical to an RNA sequence encoded by the PTPN2 gene (SEQ ID NO: 3) or the Ptpn2 gene (SEQ ID NO: 4). In some embodiments, the at least one PTPN2-targeting siRNA or an shRNA molecule binds to a target RNA sequence that is 100% identical to an RNA sequence encoded by the PTPN2 gene (SEQ ID NO: 3) or the Ptpn2 gene (SEQ ID NO: 4).

[0384] In some embodiments, the at least one PTPN2-targeting nucleic acid molecule binds to a target RNA sequence that is at least 95%, 96%, 97%, 98%, or 99% identical to an RNA sequence encoded by a DNA sequence defined by a set of genomic coordinates shown in Table 9 or Table 10. In some embodiments, the at least one PTPN2-targeting nucleic acid molecule binds to a target RNA sequence that is 100% identical to an RNA sequence encoded by a DNA sequence defined by a set of genomic coordinates shown in Table 9 (human genome) or Table 10 (mouse genome). In some embodiments, the at least one PTPN2-targeting nucleic acid molecule binds to a target RNA sequence that is at least 95%, 96%, 97%, 98%, or 99% identical to an RNA sequence encoded by one of SEQ ID NOs: 201-327. In some embodiments, the at least one PTPN2-targeting nucleic acid molecule binds to a human target RNA sequence that is at least 95%, 96%, 97%, 98%, or 99% identical to a human RNA sequence encoded by one of SEQ ID NOs: 201-314. In some embodiments, the at least one PTPN2-targeting nucleic acid molecule binds to a target RNA sequence that is 100% identical to an RNA sequence encoded by one of SEQ ID NOs: 201-327. In some embodiments, the at least one PTPN2-targeting nucleic acid molecule binds to a human target RNA sequence that is 100% identical to a human RNA sequence encoded by one of SEQ ID NOs: 201-314.

[0385] In some embodiments, the at least one PTPN2-targeting nucleic acid molecule is a SOCS1-targeting shRNA or siRNA molecule. In some embodiments, the at least one PTPN2-targeting shRNA or siRNA molecule binds to a target RNA sequence that is at least 95%, 96%, 97%, 98%, or 99% identical to an RNA sequence encoded by a DNA sequence defined by a set of genomic coordinates shown in Table 9 or Table 10. In some embodiments, the at least one PTPN2-targeting shRNA or siRNA molecule binds to a target RNA sequence that is 100% identical to an RNA sequence encoded by a DNA sequence defined by a set of genomic coordinates shown in Table 9 or Table 10. In some embodiments, the at least one PTPN2-targeting shRNA or siRNA molecule binds to a target RNA sequence that is at least 95%, 96%, 97%, 98%, or 99% identical to an RNA sequence encoded by one of SEQ ID NOs: 201-327. In some embodiments, the at least one PTPN2-targeting shRNA or siRNA molecule binds to a human target RNA sequence that is at least 95%, 96%, 97%, 98%, or 99% identical to a human RNA sequence encoded by one of SEQ ID NOs: 201-314. In some embodiments, the at least one PTPN2-targeting shRNA or siRNA molecule binds to a human target RNA sequence that is 100% identical to a human RNA sequence encoded by one of SEQ ID NOs: 201-327. In some embodiments, the at least one PTPN2-targeting shRNA or siRNA molecule binds to a target RNA sequence that is 100% identical to an RNA sequence encoded by one of SEQ ID NOs: 201-314.

TABLE 9
PTPN2 Human Genome Coordinates

| Target | Coordinates |
|---|---|
| PTPN2 | Chr18: 12859218-12859237 |
| PTPN2 | Chr18: 12884109-12884128 |
| PTPN2 | Chr18: 12817227-12817246 |
| PTPN2 | Chr18: 12817234-12817253 |
| PTPN2 | Chr18: 12884091-12884110 |
| PTPN2 | Chr18: 12884121-12884140 |
| PTPN2 | Chr18: 12831010-12831029 |
| PTPN2 | Chr18: 12817208-12817227 |
| PTPN2 | Chr18: 12817158-12817177 |
| PTPN2 | Chr18: 12831016-12831035 |
| PTPN2 | Chr18: 12817228-12817247 |
| PTPN2 | Chr18: 12830964-12830983 |
| PTPN2 | Chr18: 12801972-12801991 |
| PTPN2 | Chr18: 12836818-12836837 |
| PTPN2 | Chr18: 12817215-12817234 |
| PTPN2 | Chr18: 12802018-12802037 |
| PTPN2 | Chr18: 12884116-12884135 |
| PTPN2 | Chr18: 12840739-12840758 |
| PTPN2 | Chr18: 12802004-12802023 |
| PTPN2 | Chr18: 12840767-12840786 |
| PTPN2 | Chr18: 12817197-12817216 |
| PTPN2 | Chr18: 12884108-12884127 |
| PTPN2 | Chr18: 12817221-12817240 |
| PTPN2 | Chr18: 12836820-12836839 |
| PTPN2 | Chr18: 12884124-12884143 |
| PTPN2 | Chr18: 12830996-12831015 |
| PTPN2 | Chr18: 12830942-12830961 |
| PTPN2 | Chr18: 12884112-12884131 |
| PTPN2 | Chr18: 12817193-12817212 |
| PTPN2 | Chr18: 12859205-12859224 |
| PTPN2 | Chr18: 12817202-12817221 |
| PTPN2 | Chr18: 12859216-12859235 |
| PTPN2 | Chr18: 12859215-12859234 |
| PTPN2 | Chr18: 12817201-12817220 |
| PTPN2 | Chr18: 12802134-12802153 |
| PTPN2 | Chr18: 12884075-12884094 |
| PTPN2 | Chr18: 12884115-12884134 |
| PTPN2 | Chr18: 12840757-12840776 |
| PTPN2 | Chr18: 12814205-12814224 |
| PTPN2 | Chr18: 12840777-12840796 |
| PTPN2 | Chr18: 12814277-12814296 |
| PTPN2 | Chr18: 12840746-12840765 |
| PTPN2 | Chr18: 12801989-12802008 |
| PTPN2 | Chr18: 12819237-12819256 |
| PTPN2 | Chr18: 12814348-12814367 |
| PTPN2 | Chr18: 12794428-12794447 |
| PTPN2 | Chr18: 12831005-12831024 |
| PTPN2 | Chr18: 12825890-12825909 |
| PTPN2 | Chr18: 12840723-12840742 |
| PTPN2 | Chr18: 12840747-12840766 |
| PTPN2 | Chr18: 12802068-12802087 |
| PTPN2 | Chr18: 12840716-12840735 |
| PTPN2 | Chr18: 12840773-12840792 |
| PTPN2 | Chr18: 12831012-12831031 |
| PTPN2 | Chr18: 12814240-12814259 |
| PTPN2 | Chr18: 12802130-12802149 |
| PTPN2 | Chr18: 12794454-12794473 |
| PTPN2 | Chr18: 12817208-12817227 |
| PTPN2 | Chr18: 12819226-12819245 |
| PTPN2 | Chr18: 12825889-12825908 |
| PTPN2 | Chr18: 12840782-12840801 |
| PTPN2 | Chr18: 12836812-12836831 |
| PTPN2 | Chr18: 12817298-12817317 |
| PTPN2 | Chr18: 12817324-12817343 |
| PTPN2 | Chr18: 12819268-12819287 |
| PTPN2 | Chr18: 12817303-12817322 |
| PTPN2 | Chr18: 12825927-12825946 |
| PTPN2 | Chr18: 12817220-12817239 |
| PTPN2 | Chr18: 12825901-12825920 |
| PTPN2 | Chr18: 12814222-12814241 |
| PTPN2 | Chr18: 12831000-12831019 |
| PTPN2 | Chr18: 12840738-12840757 |
| PTPN2 | Chr18: 12802057-12802076 |
| PTPN2 | Chr18: 12802069-12802088 |
| PTPN2 | Chr18: 12884123-12884142 |
| PTPN2 | Chr18: 12814294-12814313 |
| PTPN2 | Chr18: 12817283-12817302 |
| PTPN2 | Chr18: 12830945-12830964 |
| PTPN2 | Chr18: 12817284-12817303 |
| PTPN2 | Chr18: 12817256-12817275 |
| PTPN2 | Chr18: 12884062-12884081 |
| PTPN2 | Chr18: 12814295-12814314 |
| PTPN2 | Chr18: 12817313-12817332 |
| PTPN2 | Chr18: 12814255-12814274 |
| PTPN2 | Chr18: 12814253-12814272 |
| PTPN2 | Chr18: 12814257-12814276 |
| PTPN2 | Chr18: 12814256-12814275 |
| PTPN2 | Chr18: 12840753-12840772 |
| PTPN2 | Chr18: 12830957-12830976 |
| PTPN2 | Chr18: 12802093-12802112 |
| PTPN2 | Chr18: 12817333-12817352 |
| PTPN2 | Chr18: 12794479-12794498 |
| PTPN2 | Chr18: 12814223-12814242 |
| PTPN2 | Chr18: 12802089-12802108 |
| PTPN2 | Chr18: 12794463-12794482 |
| PTPN2 | Chr18: 12794436-12794455 |
| PTPN2 | Chr18: 12794416-12794435 |
| PTPN2 | Chr18: 12817235-12817254 |
| PTPN2 | Chr18: 12836793-12836812 |
| PTPN2 | Chr18: 12801986-12802005 |
| PTPN2 | Chr18: 12817165-12817184 |
| PTPN2 | Chr18: 12817179-12817198 |
| PTPN2 | Chr18: 12794425-12794444 |
| PTPN2 | Chr18: 12802146-12802165 |

TABLE 10
Ptpn2 Murine Genome Coordinates

| Target | Coordinates |
|---|---|
| Ptpn2 | Chr18: 67680998-67681017 |
| Ptpn2 | Chr18: 67677801-67677820 |
| Ptpn2 | Chr18: 67680904-67680923 |
| Ptpn2 | Chr18: 67681553-67681572 |
| Ptpn2 | Chr18: 67688965-67688984 |
| Ptpn2 | Chr18: 67680958-67680977 |
| Ptpn2 | Chr18: 67688944-67688963 |
| Ptpn2 | Chr18: 67677855-67677874 |
| Ptpn2 | Chr18: 67677734-67677753 |
| Ptpn2 | Chr18: 67680967-67680986 |
| Ptpn2 | Chr18: 67688912-67688931 |
| Ptpn2 | Chr18: 67680881-67680900 |
| Ptpn2 | Chr18: 67681529-67681548 |

[0386] In some embodiments, the nucleic acid-based gene-regulating system comprises at least one nucleic acid molecule (e.g., an siRNA, an shRNA, an RNA aptamer, or a morpholino), wherein the at least one nucleic acid molecule is a ZC3H12A-targeting nucleic acid molecule. In some embodiments, the at least one ZC3H12A-targeting nucleic acid molecule binds to a target RNA sequence that is at least 95%, 96%, 97%, 98%, or 99% identical to an RNA sequence encoded by the ZC3H12A gene (SEQ ID NO: 5) or the Zc3h12a gene (SEQ ID NO: 6). In some embodiments, the at least one ZC3H12A-targeting nucleic acid molecule binds to a target RNA sequence that is 100% identical to an RNA sequence encoded by the ZC3H12A gene (SEQ ID NO: 5) or the Zc3h12a gene (SEQ ID NO: 6). In some embodiments, the at least one ZC3H12A-targeting nucleic acid molecule is an siRNA or an shRNA molecule. In some embodiments, the at least one ZC3H12A-targeting siRNA or an shRNA molecule binds to a target RNA sequence that is at least 95%, 96%, 97%, 98%, or 99% identical to an RNA sequence encoded by the ZC3H12A gene (SEQ ID NO: 5) or the Zc3h12a gene (SEQ ID NO: 6). In some embodiments, the at least one ZC3H12A-targeting siRNA or an shRNA molecule binds to a target RNA sequence that is 100% identical to an RNA sequence encoded by the ZC3H12A gene (SEQ ID NO: 5) or the Zc3h12a gene (SEQ ID NO: 6).

[0387] In some embodiments, the at least one ZC3H12A-targeting nucleic acid molecule binds to a target RNA sequence that is at least 95%, 96%, 97%, 98%, or 99% identical to an RNA sequence encoded by a DNA sequence defined by a set of genomic coordinates shown in Table 11 (human genome) or Table 12 (mouse genome). In some embodiments, the at least one ZC3H12A-targeting nucleic acid molecule binds to a target RNA sequence that is 100% identical to an RNA sequence encoded by a DNA sequence defined by a set of genomic coordinates shown in Table 11 or Table 12. In some embodiments, the at least one ZC3H12A-targeting nucleic acid molecule binds to a target RNA sequence that is at least 95%, 96%, 97%, 98%, or 99% identical to an RNA sequence encoded by one of SEQ ID NOs: 331-337 or 331-797. In some embodiments, the at least one ZC3H12A-targeting nucleic acid molecule binds to a target RNA sequence that is 100% identical to an RNA sequence encoded by one of SEQ ID NOs: 331-337 or 331-797.

[0388] In some embodiments, the at least one ZC3H12A-targeting nucleic acid molecule is a ZC3H12A-targeting shRNA or siRNA molecule. In some embodiments, the at least one ZC3H12A-targeting shRNA or siRNA molecule binds to a target RNA sequence that is at least 95%, 96%, 97%, 98%, or 99% identical to an RNA sequence encoded by a DNA sequence defined by a set of genomic coordinates shown in Table 11 or Table 12. In some embodiments, the at least one ZC3H12A-targeting shRNA or siRNA molecule binds to a target RNA sequence that is 100% identical to an RNA sequence encoded by a DNA sequence defined by a set of genomic coordinates shown in Table 11 or Table 12. In some embodiments, the ZC3H12A-targeting nucleic acid molecule is a ZC3H12A-targeting siRNA comprising a nucleic acid sequence selected from SEQ ID NOs: 328-330 or 329 and 330 (human) (See Liu et al., Scientific Reports (2016), 6, Article #24073 and Mino et al., Cell (2015) 161(5), 1058-1073, incorporated herein by reference in its entirety). In some embodiments, the at least one ZC3H12A-targeting shRNA or siRNA molecule binds to a target RNA sequence that is at least 95%, 96%, 97%, 98%, or 99% identical to an RNA sequence encoded by one of SEQ ID NOs: 331-797. In some embodiments, the at least one ZC3H12A-targeting shRNA or siRNA molecule binds to a human target RNA sequence that is at least 95%, 96%, 97%, 98%, or 99% identical to a human RNA sequence encoded by one of SEQ ID NOs: 336-789. In some embodiments, the at least one ZC3H12A-targeting shRNA or siRNA molecule binds to a target RNA sequence that is 100% identical to an RNA sequence encoded by one of SEQ ID NOs: 331-797. In some embodiments, the at least one ZC3H12A-targeting shRNA or siRNA molecule binds to a human target RNA sequence that is 100% identical to a human RNA sequence encoded by one of SEQ ID NOs: 336-789. In some embodiments, the ZC3H12A-targeting nucleic acid molecule is a ZC3H12A-targeting shRNA molecule encoded by a nucleic acid sequence selected from SEQ ID NOs: 331-337 (See Huang et al., J Biol Chem (2015) 290(34), 20782-20792, incorporated by reference herein in its entirety).

TABLE 11
ZC3H12A Human Genome Coordinates

| Target | Coordinates |
|---|---|
| ZC3H12A | Chr1: 37481708-37481727 |
| ZC3H12A | Chr1: 37475808-37475827 |
| ZC3H12A | Chr1: 37475809-37475828 |
| ZC3H12A | Chr1: 37475684-37475703 |
| ZC3H12A | Chr1: 37481823-37481842 |
| ZC3H12A | Chr1: 37480415-37480434 |
| ZC3H12A | Chr1: 37475756-37475775 |
| ZC3H12A | Chr1: 37481692-37481711 |
| ZC3H12A | Chr1: 37481648-37481667 |
| ZC3H12A | Chr1: 37480284-37480303 |
| ZC3H12A | Chr1: 37481779-37481798 |
| ZC3H12A | Chr1: 37475827-37475846 |
| ZC3H12A | Chr1: 37481747-37481766 |
| ZC3H12A | Chr1: 37482445-37482464 |
| ZC3H12A | Chr1: 37475631-37475650 |
| ZC3H12A | Chr1: 37480274-37480293 |
| ZC3H12A | Chr1: 37482967-37482986 |
| ZC3H12A | Chr1: 37482922-37482941 |
| ZC3H12A | Chr1: 37480273-37480292 |
| ZC3H12A | Chr1: 37482886-37482905 |
| ZC3H12A | Chr1: 37483185-37483204 |
| ZC3H12A | Chr1: 37475817-37475836 |
| ZC3H12A | Chr1: 37483033-37483052 |
| ZC3H12A | Chr1: 37480408-37480427 |
| ZC3H12A | Chr1: 37483026-37483045 |
| ZC3H12A | Chr1: 37483463-37483482 |
| ZC3H12A | Chr1: 37480362-37480381 |
| ZC3H12A | Chr1: 37482962-37482981 |
| ZC3H12A | Chr1: 37475775-37475794 |
| ZC3H12A | Chr1: 37475509-37475528 |
| ZC3H12A | Chr1: 37475722-37475741 |
| ZC3H12A | Chr1: 37475818-37475837 |
| ZC3H12A | Chr1: 37482966-37482985 |
| ZC3H12A | Chr1: 37480388-37480407 |
| ZC3H12A | Chr1: 37483142-37483161 |
| ZC3H12A | Chr1: 37482448-37482467 |
| ZC3H12A | Chr1: 37483049-37483068 |
| ZC3H12A | Chr1: 37482905-37482924 |
| ZC3H12A | Chr1: 37482733-37482752 |
| ZC3H12A | Chr1: 37480423-37480442 |
| ZC3H12A | Chr1: 37482456-37482475 |
| ZC3H12A | Chr1: 37483551-37483570 |
| ZC3H12A | Chr1: 37481767-37481786 |
| ZC3H12A | Chr1: 37475715-37475734 |
| ZC3H12A | Chr1: 37483377-37483396 |
| ZC3H12A | Chr1: 37475593-37475612 |
| ZC3H12A | Chr1: 37475875-37475894 |
| ZC3H12A | Chr1: 37475534-37475553 |
| ZC3H12A | Chr1: 37482764-37482783 |
| ZC3H12A | Chr1: 37475869-37475888 |
| ZC3H12A | Chr1: 37483437-37483456 |
| ZC3H12A | Chr1: 37475598-37475617 |
| ZC3H12A | Chr1: 37482438-37482457 |
| ZC3H12A | Chr1: 37483257-37483276 |
| ZC3H12A | Chr1: 37483263-37483282 |
| ZC3H12A | Chr1: 37482545-37482564 |
| ZC3H12A | Chr1: 37483015-37483034 |
| ZC3H12A | Chr1: 37481595-37481614 |
| ZC3H12A | Chr1: 37482923-37482942 |
| ZC3H12A | Chr1: 37483143-37483162 |
| ZC3H12A | Chr1: 37482348-37482367 |
| ZC3H12A | Chr1: 37483018-37483037 |
| ZC3H12A | Chr1: 37482612-37482631 |
| ZC3H12A | Chr1: 37475613-37475632 |
| ZC3H12A | Chr1: 37475563-37475582 |
| ZC3H12A | Chr1: 37475535-37475554 |
| ZC3H12A | Chr1: 37482843-37482862 |
| ZC3H12A | Chr1: 37480424-37480443 |
| ZC3H12A | Chr1: 37482606-37482625 |
| ZC3H12A | Chr1: 37483098-37483117 |
| ZC3H12A | Chr1: 37483508-37483527 |
| ZC3H12A | Chr1: 37483559-37483578 |
| ZC3H12A | Chr1: 37483256-37483275 |
| ZC3H12A | Chr1: 37475936-37475955 |
| ZC3H12A | Chr1: 37475607-37475626 |
| ZC3H12A | Chr1: 37475809-37475828 |
| ZC3H12A | Chr1: 37483186-37483205 |
| ZC3H12A | Chr1: 37481747-37481766 |
| ZC3H12A | Chr1: 37482734-37482753 |
| ZC3H12A | Chr1: 37483278-37483297 |
| ZC3H12A | Chr1: 37482332-37482351 |
| ZC3H12A | Chr1: 37483109-37483128 |
| ZC3H12A | Chr1: 37475633-37475652 |
| ZC3H12A | Chr1: 37482591-37482610 |
| ZC3H12A | Chr1: 37483271-37483290 |
| ZC3H12A | Chr1: 37483603-37483622 |
| ZC3H12A | Chr1: 37482504-37482523 |
| ZC3H12A | Chr1: 37483252-37483271 |
| ZC3H12A | Chr1: 37483119-37483138 |
| ZC3H12A | Chr1: 37482343-37482362 |
| ZC3H12A | Chr1: 37483144-37483163 |
| ZC3H12A | Chr1: 37483213-37483232 |
| ZC3H12A | Chr1: 37482981-37483000 |
| ZC3H12A | Chr1: 37482789-37482808 |
| ZC3H12A | Chr1: 37483159-37483178 |
| ZC3H12A | Chr1: 37482349-37482368 |
| ZC3H12A | Chr1: 37483602-37483621 |
| ZC3H12A | Chr1: 37481596-37481615 |
| ZC3H12A | Chr1: 37482537-37482556 |
| ZC3H12A | Chr1: 37482370-37482389 |
| ZC3H12A | Chr1: 37475546-37475565 |
| ZC3H12A | Chr1: 37482598-37482617 |
| ZC3H12A | Chr1: 37483146-37483165 |
| ZC3H12A | Chr1: 37475812-37475831 |
| ZC3H12A | Chr1: 37483400-37483419 |
| ZC3H12A | Chr1: 37475703-37475722 |
| ZC3H12A | Chr1: 37483418-37483437 |
| ZC3H12A | Chr1: 37480284-37480303 |
| ZC3H12A | Chr1: 37482800-37482819 |
| ZC3H12A | Chr1: 37475721-37475740 |
| ZC3H12A | Chr1: 37482715-37482734 |
| ZC3H12A | Chr1: 37480281-37480300 |
| ZC3H12A | Chr1: 37482491-37482510 |
| ZC3H12A | Chr1: 37483497-37483516 |
| ZC3H12A | Chr1: 37475899-37475918 |
| ZC3H12A | Chr1: 37475889-37475908 |
| ZC3H12A | Chr1: 37482375-37482394 |
| ZC3H12A | Chr1: 37475741-37475760 |
| ZC3H12A | Chr1: 37482900-37482919 |
| ZC3H12A | Chr1: 37482442-37482461 |
| ZC3H12A | Chr1: 37481644-37481663 |
| ZC3H12A | Chr1: 37482464-37482483 |
| ZC3H12A | Chr1: 37482994-37483013 |
| ZC3H12A | Chr1: 37483437-37483456 |
| ZC3H12A | Chr1: 37482736-37482755 |
| ZC3H12A | Chr1: 37482538-37482557 |
| ZC3H12A | Chr1: 37483515-37483534 |
| ZC3H12A | Chr1: 37475874-37475893 |
| ZC3H12A | Chr1: 37483145-37483164 |
| ZC3H12A | Chr1: 37482587-37482606 |
| ZC3H12A | Chr1: 37475482-37475501 |
| ZC3H12A | Chr1: 37475844-37475863 |
| ZC3H12A | Chr1: 37480415-37480434 |
| ZC3H12A | Chr1: 37481709-37481728 |
| ZC3H12A | Chr1: 37483366-37483385 |
| ZC3H12A | Chr1: 37475627-37475646 |
| ZC3H12A | Chr1: 37482447-37482466 |
| ZC3H12A | Chr1: 37481758-37481777 |
| ZC3H12A | Chr1: 37483560-37483579 |
| ZC3H12A | Chr1: 37475869-37475888 |
| ZC3H12A | Chr1: 37481655-37481674 |
| ZC3H12A | Chr1: 37481645-37481664 |
| ZC3H12A | Chr1: 37483016-37483035 |
| ZC3H12A | Chr1: 37475838-37475857 |
| ZC3H12A | Chr1: 37482850-37482869 |
| ZC3H12A | Chr1: 37475510-37475529 |
| ZC3H12A | Chr1: 37483510-37483529 |
| ZC3H12A | Chr1: 37483064-37483083 |
| ZC3H12A | Chr1: 37483149-37483168 |
| ZC3H12A | Chr1: 37483449-37483468 |
| ZC3H12A | Chr1: 37483264-37483283 |
| ZC3H12A | Chr1: 37475508-37475527 |
| ZC3H12A | Chr1: 37480415-37480434 |
| ZC3H12A | Chr1: 37482918-37482937 |
| ZC3H12A | Chr1: 37482474-37482493 |
| ZC3H12A | Chr1: 37483232-37483251 |
| ZC3H12A | Chr1: 37475732-37475751 |
| ZC3H12A | Chr1: 37481602-37481621 |
| ZC3H12A | Chr1: 37480289-37480308 |
| ZC3H12A | Chr1: 37483165-37483184 |
| ZC3H12A | Chr1: 37483248-37483267 |
| ZC3H12A | Chr1: 37483078-37483097 |
| ZC3H12A | Chr1: 37483017-37483036 |
| ZC3H12A | Chr1: 37483174-37483193 |
| ZC3H12A | Chr1: 37482857-37482876 |
| ZC3H12A | Chr1: 37475578-37475597 |
| ZC3H12A | Chr1: 37480329-37480348 |
| ZC3H12A | Chr1: 37480288-37480307 |
| ZC3H12A | Chr1: 37481600-37481619 |
| ZC3H12A | Chr1: 37483212-37483231 |
| ZC3H12A | Chr1: 37483337-37483356 |
| ZC3H12A | Chr1: 37475542-37475561 |
| ZC3H12A | Chr1: 37483197-37483216 |
| ZC3H12A | Chr1: 37482730-37482749 |
| ZC3H12A | Chr1: 37475599-37475618 |
| ZC3H12A | Chr1: 37483262-37483281 |
| ZC3H12A | Chr1: 37482790-37482809 |
| ZC3H12A | Chr1: 37482719-37482738 |
| ZC3H12A | Chr1: 37482860-37482879 |
| ZC3H12A | Chr1: 37483443-37483462 |
| ZC3H12A | Chr1: 37483558-37483577 |
| ZC3H12A | Chr1: 37481599-37481618 |
| ZC3H12A | Chr1: 37475845-37475864 |
| ZC3H12A | Chr1: 37475730-37475749 |
| ZC3H12A | Chr1: 37482524-37482543 |
| ZC3H12A | Chr1: 37482849-37482868 |
| ZC3H12A | Chr1: 37475529-37475548 |
| ZC3H12A | Chr1: 37475664-37475683 |
| ZC3H12A | Chr1: 37482972-37482991 |
| ZC3H12A | Chr1: 37483321-37483340 |
| ZC3H12A | Chr1: 37482984-37483003 |
| ZC3H12A | Chr1: 37475807-37475826 |
| ZC3H12A | Chr1: 37483213-37483232 |
| ZC3H12A | Chr1: 37482427-37482446 |
| ZC3H12A | Chr1: 37483104-37483123 |
| ZC3H12A | Chr1: 37482879-37482898 |
| ZC3H12A | Chr1: 37483409-37483428 |
| ZC3H12A | Chr1: 37482752-37482771 |
| ZC3H12A | Chr1: 37480391-37480410 |
| ZC3H12A | Chr1: 37475694-37475713 |
| ZC3H12A | Chr1: 37482458-37482477 |
| ZC3H12A | Chr1: 37475774-37475793 |
| ZC3H12A | Chr1: 37475574-37475593 |
| ZC3H12A | Chr1: 37475803-37475822 |
| ZC3H12A | Chr1: 37481605-37481624 |
| ZC3H12A | Chr1: 37482437-37482456 |
| ZC3H12A | Chr1: 37482825-37482844 |
| ZC3H12A | Chr1: 37483595-37483614 |
| ZC3H12A | Chr1: 37483510-37483529 |
| ZC3H12A | Chr1: 37483283-37483302 |
| ZC3H12A | Chr1: 37482446-37482465 |
| ZC3H12A | Chr1: 37475700-37475719 |
| ZC3H12A | Chr1: 37475721-37475740 |
| ZC3H12A | Chr1: 37475628-37475647 |
| ZC3H12A | Chr1: 37482848-37482867 |
| ZC3H12A | Chr1: 37483134-37483153 |
| ZC3H12A | Chr1: 37475543-37475562 |
| ZC3H12A | Chr1: 37482799-37482818 |
| ZC3H12A | Chr1: 37483296-37483315 |
| ZC3H12A | Chr1: 37483332-37483351 |
| ZC3H12A | Chr1: 37483600-37483619 |
| ZC3H12A | Chr1: 37482410-37482429 |
| ZC3H12A | Chr1: 37481718-37481737 |
| ZC3H12A | Chr1: 37483395-37483414 |
| ZC3H12A | Chr1: 37482428-37482447 |
| ZC3H12A | Chr1: 37475562-37475581 |
| ZC3H12A | Chr1: 37483500-37483519 |
| ZC3H12A | Chr1: 37475827-37475846 |
| ZC3H12A | Chr1: 37483586-37483605 |
| ZC3H12A | Chr1: 37483089-37483108 |
| ZC3H12A | Chr1: 37483419-37483438 |
| ZC3H12A | Chr1: 37480285-37480304 |
| ZC3H12A | Chr1: 37483256-37483275 |
| ZC3H12A | Chr1: 37483420-37483439 |
| ZC3H12A | Chr1: 37475691-37475710 |
| ZC3H12A | Chr1: 37483419-37483438 |
| ZC3H12A | Chr1: 37475918-37475937 |
| ZC3H12A | Chr1: 37475589-37475608 |
| ZC3H12A | Chr1: 37482362-37482381 |
| ZC3H12A | Chr1: 37482566-37482585 |
| ZC3H12A | Chr1: 37482963-37482982 |
| ZC3H12A | Chr1: 37483420-37483439 |
| ZC3H12A | Chr1: 37483139-37483158 |
| ZC3H12A | Chr1: 37483619-37483638 |
| ZC3H12A | Chr1: 37481764-37481783 |
| ZC3H12A | Chr1: 37475650-37475669 |
| ZC3H12A | Chr1: 37483405-37483424 |
| ZC3H12A | Chr1: 37483037-37483056 |
| ZC3H12A | Chr1: 37483211-37483230 |
| ZC3H12A | Chr1: 37475537-37475556 |
| ZC3H12A | Chr1: 37475756-37475775 |
| ZC3H12A | Chr1: 37482403-37482422 |
| ZC3H12A | Chr1: 37482455-37482474 |
| ZC3H12A | Chr1: 37480311-37480330 |
| ZC3H12A | Chr1: 37482586-37482605 |
| ZC3H12A | Chr1: 37483099-37483118 |
| ZC3H12A | Chr1: 37483342-37483361 |
| ZC3H12A | Chr1: 37481823-37481842 |
| ZC3H12A | Chr1: 37482777-37482796 |
| ZC3H12A | Chr1: 37482412-37482431 |
| ZC3H12A | Chr1: 37483604-37483623 |
| ZC3H12A | Chr1: 37483438-37483457 |
| ZC3H12A | Chr1: 37482445-37482464 |
| ZC3H12A | Chr1: 37483331-37483350 |
| ZC3H12A | Chr1: 37483111-37483130 |
| ZC3H12A | Chr1: 37482847-37482866 |
| ZC3H12A | Chr1: 37483249-37483268 |
| ZC3H12A | Chr1: 37481754-37481773 |
| ZC3H12A | Chr1: 37475684-37475703 |
| ZC3H12A | Chr1: 37482519-37482538 |
| ZC3H12A | Chr1: 37482475-37482494 |
| ZC3H12A | Chr1: 37482613-37482632 |
| ZC3H12A | Chr1: 37482939-37482958 |
| ZC3H12A | Chr1: 37475541-37475560 |
| ZC3H12A | Chr1: 37481763-37481782 |
| ZC3H12A | Chr1: 37483231-37483250 |
| ZC3H12A | Chr1: 37482953-37482972 |
| ZC3H12A | Chr1: 37482407-37482426 |
| ZC3H12A | Chr1: 37475808-37475827 |
| ZC3H12A | Chr1: 37481620-37481639 |
| ZC3H12A | Chr1: 37475592-37475611 |
| ZC3H12A | Chr1: 37483156-37483175 |
| ZC3H12A | Chr1: 37480329-37480348 |
| ZC3H12A | Chr1: 37475573-37475592 |
| ZC3H12A | Chr1: 37483198-37483217 |
| ZC3H12A | Chr1: 37483557-37483576 |
| ZC3H12A | Chr1: 37482892-37482911 |
| ZC3H12A | Chr1: 37483334-37483353 |
| ZC3H12A | Chr1: 37481708-37481727 |
| ZC3H12A | Chr1: 37483063-37483082 |
| ZC3H12A | Chr1: 37482998-37483017 |
| ZC3H12A | Chr1: 37482942-37482961 |
| ZC3H12A | Chr1: 37475508-37475527 |
| ZC3H12A | Chr1: 37482371-37482390 |
| ZC3H12A | Chr1: 37483119-37483138 |
| ZC3H12A | Chr1: 37482798-37482817 |
| ZC3H12A | Chr1: 37475859-37475878 |
| ZC3H12A | Chr1: 37483401-37483420 |
| ZC3H12A | Chr1: 37482851-37482870 |
| ZC3H12A | Chr1: 37475524-37475543 |
| ZC3H12A | Chr1: 37475601-37475620 |
| ZC3H12A | Chr1: 37475815-37475834 |
| ZC3H12A | Chr1: 37482801-37482820 |
| ZC3H12A | Chr1: 37475544-37475563 |
| ZC3H12A | Chr1: 37483010-37483029 |
| ZC3H12A | Chr1: 37483077-37483096 |
| ZC3H12A | Chr1: 37482404-37482423 |
| ZC3H12A | Chr1: 37475692-37475711 |
| ZC3H12A | Chr1: 37483596-37483615 |
| ZC3H12A | Chr1: 37483372-37483391 |
| ZC3H12A | Chr1: 37481596-37481615 |
| ZC3H12A | Chr1: 37480370-37480389 |
| ZC3H12A | Chr1: 37480377-37480396 |
| ZC3H12A | Chr1: 37483381-37483400 |
| ZC3H12A | Chr1: 37482899-37482918 |
| ZC3H12A | Chr1: 37480373-37480392 |
| ZC3H12A | Chr1: 37481847-37481866 |
| ZC3H12A | Chr1: 37483330-37483349 |
| ZC3H12A | Chr1: 37483065-37483084 |
| ZC3H12A | Chr1: 37482499-37482518 |
| ZC3H12A | Chr1: 37483105-37483124 |
| ZC3H12A | Chr1: 37475631-37475650 |
| ZC3H12A | Chr1: 37483530-37483549 |
| ZC3H12A | Chr1: 37483407-37483426 |
| ZC3H12A | Chr1: 37483308-37483327 |
| ZC3H12A | Chr1: 37482853-37482872 |
| ZC3H12A | Chr1: 37482934-37482953 |
| ZC3H12A | Chr1: 37475591-37475610 |
| ZC3H12A | Chr1: 37475826-37475845 |
| ZC3H12A | Chr1: 37475865-37475884 |
| ZC3H12A | Chr1: 37481784-37481803 |
| ZC3H12A | Chr1: 37480322-37480341 |
| ZC3H12A | Chr1: 37475664-37475683 |
| ZC3H12A | Chr1: 37475757-37475776 |
| ZC3H12A | Chr1: 37483385-37483404 |
| ZC3H12A | Chr1: 37482933-37482952 |
| ZC3H12A | Chr1: 37475866-37475885 |
| ZC3H12A | Chr1: 37475843-37475862 |
| ZC3H12A | Chr1: 37475797-37475816 |
| ZC3H12A | Chr1: 37475642-37475661 |
| ZC3H12A | Chr1: 37483270-37483289 |
| ZC3H12A | Chr1: 37483024-37483043 |
| ZC3H12A | Chr1: 37483201-37483220 |
| ZC3H12A | Chr1: 37482447-37482466 |
| ZC3H12A | Chr1: 37483253-37483272 |
| ZC3H12A | Chr1: 37483429-37483448 |
| ZC3H12A | Chr1: 37483195-37483214 |
| ZC3H12A | Chr1: 37481648-37481667 |
| ZC3H12A | Chr1: 37483424-37483443 |
| ZC3H12A | Chr1: 37475580-37475599 |
| ZC3H12A | Chr1: 37482980-37482999 |
| ZC3H12A | Chr1: 37480408-37480427 |
| ZC3H12A | Chr1: 37483405-37483424 |
| ZC3H12A | Chr1: 37475740-37475759 |
| ZC3H12A | Chr1: 37480387-37480406 |
| ZC3H12A | Chr1: 37483507-37483526 |
| ZC3H12A | Chr1: 37483110-37483129 |
| ZC3H12A | Chr1: 37483325-37483344 |
| ZC3H12A | Chr1: 37481692-37481711 |
| ZC3H12A | Chr1: 37475826-37475845 |
| ZC3H12A | Chr1: 37483098-37483117 |
| ZC3H12A | Chr1: 37481758-37481777 |
| ZC3H12A | Chr1: 37480320-37480339 |
| ZC3H12A | Chr1: 37483380-37483399 |
| ZC3H12A | Chr1: 37483011-37483030 |
| ZC3H12A | Chr1: 37483509-37483528 |
| ZC3H12A | Chr1: 37483509-37483528 |
| ZC3H12A | Chr1: 37482768-37482787 |
| ZC3H12A | Chr1: 37475804-37475823 |
| ZC3H12A | Chr1: 37475808-37475827 |
| ZC3H12A | Chr1: 37475859-37475878 |
| ZC3H12A | Chr1: 37482973-37482992 |
| ZC3H12A | Chr1: 37475634-37475653 |
| ZC3H12A | Chr1: 37475854-37475873 |
| ZC3H12A | Chr1: 37480334-37480353 |
| ZC3H12A | Chr1: 37480414-37480433 |
| ZC3H12A | Chr1: 37480316-37480335 |
| ZC3H12A | Chr1: 37482971-37482990 |
| ZC3H12A | Chr1: 37482781-37482800 |
| ZC3H12A | Chr1: 37483173-37483192 |
| ZC3H12A | Chr1: 37482391-37482410 |
| ZC3H12A | Chr1: 37482392-37482411 |
| ZC3H12A | Chr1: 37482936-37482955 |
| ZC3H12A | Chr1: 37483408-37483427 |
| ZC3H12A | Chr1: 37481779-37481798 |
| ZC3H12A | Chr1: 37483206-37483225 |
| ZC3H12A | Chr1: 37482561-37482580 |
| ZC3H12A | Chr1: 37481745-37481764 |
| ZC3H12A | Chr1: 37475802-37475821 |
| ZC3H12A | Chr1: 37483494-37483513 |
| ZC3H12A | Chr1: 37483371-37483390 |
| ZC3H12A | Chr1: 37482552-37482571 |
| ZC3H12A | Chr1: 37475491-37475510 |
| ZC3H12A | Chr1: 37482479-37482498 |
| ZC3H12A | Chr1: 37483140-37483159 |
| ZC3H12A | Chr1: 37483313-37483332 |
| ZC3H12A | Chr1: 37483458-37483477 |
| ZC3H12A | Chr1: 37483320-37483339 |
| ZC3H12A | Chr1: 37483204-37483223 |
| ZC3H12A | Chr1: 37475792-37475811 |
| ZC3H12A | Chr1: 37483475-37483494 |
| ZC3H12A | Chr1: 37475577-37475596 |
| ZC3H12A | Chr1: 37475787-37475806 |
| ZC3H12A | Chr1: 37483574-37483593 |
| ZC3H12A | Chr1: 37480284-37480303 |
| ZC3H12A | Chr1: 37482369-37482388 |
| ZC3H12A | Chr1: 37483384-37483403 |
| ZC3H12A | Chr1: 37483425-37483444 |
| ZC3H12A | Chr1: 37482582-37482601 |
| ZC3H12A | Chr1: 37483153-37483172 |
| ZC3H12A | Chr1: 37482935-37482954 |
| ZC3H12A | Chr1: 37483378-37483397 |
| ZC3H12A | Chr1: 37482952-37482971 |
| ZC3H12A | Chr1: 37483399-37483418 |
| ZC3H12A | Chr1: 37483309-37483328 |
| ZC3H12A | Chr1: 37483200-37483219 |
| ZC3H12A | Chr1: 37481641-37481660 |
| ZC3H12A | Chr1: 37481656-37481675 |
| ZC3H12A | Chr1: 37483036-37483055 |
| ZC3H12A | Chr1: 37483474-37483493 |
| ZC3H12A | Chr1: 37483004-37483023 |
| ZC3H12A | Chr1: 37481846-37481865 |
| ZC3H12A | Chr1: 37483205-37483224 |
| ZC3H12A | Chr1: 37483406-37483425 |
| ZC3H12A | Chr1: 37480336-37480355 |
| ZC3H12A | Chr1: 37481716-37481735 |
| ZC3H12A | Chr1: 37480335-37480354 |
| ZC3H12A | Chr1: 37481659-37481678 |
| ZC3H12A | Chr1: 37475809-37475828 |
| ZC3H12A | Chr1: 37482565-37482584 |
| ZC3H12A | Chr1: 37482491-37482510 |
| ZC3H12A | Chr1: 37483379-37483398 |
| ZC3H12A | Chr1: 37481654-37481673 |
| ZC3H12A | Chr1: 37482567-37482586 |
| ZC3H12A | Chr1: 37481614-37481633 |
| ZC3H12A | Chr1: 37482562-37482581 |
| ZC3H12A | Chr1: 37475868-37475887 |
| ZC3H12A | Chr1: 37482557-37482576 |
| ZC3H12A | Chr1: 37483511-37483530 |
| ZC3H12A | Chr1: 37475615-37475634 |
| ZC3H12A | Chr1: 37483333-37483352 |
| ZC3H12A | Chr1: 37482840-37482859 |
| ZC3H12A | Chr1: 37483545-37483564 |
| ZC3H12A | Chr1: 37482830-37482849 |
| ZC3H12A | Chr1: 37482444-37482463 |
| ZC3H12A | Chr1: 37482571-37482590 |
| ZC3H12A | Chr1: 37482553-37482572 |
| ZC3H12A | Chr1: 37483543-37483562 |
| ZC3H12A | Chr1: 37483542-37483561 |
| ZC3H12A | Chr1: 37482575-37482594 |
| ZC3H12A | Chr1: 37475855-37475874 |
| ZC3H12A | Chr1: 37482572-37482591 |

TABLE 12
Zc3h12a Murine Genome Coordinates

| Target | Coordinates |
|---|---|
| Zc3h12a | Chr1: 125122335-125122354 |
| Zc3h12a | Chr1: 125121083-125121102 |
| Zc3h12a | Chr1: 125120961-125120980 |
| Zc3h12a | Chr1: 125122390-125122409 |
| Zc3h12a | Chr1: 125120373-125120392 |
| Zc3h12a | Chr1: 125122250-125122269 |
| Zc3h12a | Chr1: 125122375-125122394 |
| Zc3h12a | Chr1: 125120975-125120994 |

TABLE 13
Exemplary murine Zc3hl2a siRNA sequence

| Target | Sequence | SEQ ID |
|---|---|---|
| Zc3h12a_siRNA_1 | CCUGGACAACUUCCUUCGUAAGAAA | 328 |

TABLE 14
Exemplary human ZC3H12A siRNA sequences

| Target | Sequence | SEQ ID |
|---|---|---|
| ZC3H12A_siRNA_2 | GUGUCCCUAUGGAAGGAAA | 329 |
| ZC3H12A_SiRNA_3 | CAACUUCCUUCGUAAGAAA | 330 |

TABLE 15
Murine Zc3hl2a shRNA and siRNA target sequences

| | | |
|---|---|---|
| Zc3h12a_shRNA_1 | AGCGAGGCCACACAGATATTA | 331 |
| Zc3h12a_shRNA_2 | GCTATGATGACCGCTTCATTG | 332 |
| Zc3h12a_shRNA_3 | TGGTCTGAGCCGTACCCATTA | 333 |
| Zc3h12a_shRNA_4 | CTGTGTACAGAGGCGAGATTT | 334 |
| Zc3h12a_siRNA_1 | CCTGGACAACTTCCTTCGTAAGAAA | 335 |

TABLE 16
Human ZC3H12A shRNA and siRNA target sequences

| Target | Sequence | SEQ ID |
|---|---|---|
| ZC3H12A_siRNA_2 | GTGTCCCTATGGAAGGAAA | 336 |
| ZC3H12A_SiRNA_3 | CAACTTCCTTCGTAAGAAA | 337 |

[0389] In some embodiments, the nucleic acid-based gene-regulating system comprises at least one nucleic acid molecule (e.g., an siRNA, an shRNA, an RNA aptamer, or a morpholino), wherein the at least one nucleic acid molecule is a CBLB-targeting nucleic acid molecule. In some embodiments, the at least one CBLB-targeting nucleic acid molecule binds to a target RNA sequence that is at least 95%, 96%, 97%, 98%, or 99% identical to an RNA sequence encoded by the CBLB gene (SEQ ID NO: 7) or the Cblb gene (SEQ ID NO: 8). In some embodiments, the at least one CBLB-targeting nucleic acid molecule binds to a target RNA sequence that is 100% identical to an RNA sequence encoded by the CBLB gene (SEQ ID NO: 7) or the Cblb gene (SEQ ID NO: 8). In some embodiments, the at least one CBLB-targeting nucleic acid molecule is an siRNA or an shRNA molecule. In some embodiments, the at least one CBLB-targeting siRNA or an shRNA molecule binds to a target RNA sequence that is at least 95%, 96%, 97%, 98%, or 99% identical to an RNA sequence encoded by the CBLB gene (SEQ ID NO: 7) or the Cblb gene (SEQ ID NO: 8). In some embodiments, the at least one CBLB-targeting siRNA or an shRNA molecule binds to a target RNA sequence that is 100% identical to an RNA sequence encoded by the CBLB gene (SEQ ID NO: 7) or the Cblb gene (SEQ ID NO: 8).

[0390] In some embodiments, the at least one CBLB-targeting nucleic acid molecule binds to a target RNA sequence that is at least 95%, 96%, 97%, 98%, or 99% identical to an RNA sequence encoded by a DNA sequence defined by a set of genomic coordinates shown in Table 17 (human genome) or Table 18 (mouse genome). In some embodiments, the at least one CBLB-targeting nucleic acid molecule binds to a target RNA sequence that is 100% identical to an RNA sequence encoded by a DNA sequence defined by a set of genomic coordinates shown in Table 17 or Table 18. In some embodiments, the at least one CBLB-targeting nucleic acid molecule binds to a target RNA sequence that is at least 95%, 96%, 97%, 98%, or 99% identical to an RNA sequence encoded by one of SEQ ID NOs: 798-823. In some embodiments, the at least one CBLB-targeting nucleic acid molecule binds to a human target RNA sequence that is at least 95%, 96%, 97%, 98%, or 99% identical to a human RNA sequence encoded by one of SEQ ID NOs: 798-808. In some embodiments, the at least one CBLB-targeting nucleic acid molecule binds to a target RNA sequence that is 100% identical to an RNA sequence encoded by one of SEQ ID NOs: 798-823. In some embodiments, the at least one CBLB-targeting nucleic acid molecule binds to a human target RNA sequence that is 100% identical to a human RNA sequence encoded by one of SEQ ID NOs: 798-808.

[0391] In some embodiments, the at least one CBLB-targeting nucleic acid molecule is a CBLB-targeting shRNA or siRNA molecule. In some embodiments, the at least one CBLB-targeting shRNA or siRNA molecule binds to a target RNA sequence that is at least 95%, 96%, 97%, 98%, or 99% identical to an RNA sequence encoded by a DNA sequence defined by a set of genomic coordinates shown in Table 17 or Table 18. In some embodiments, the at least one CBLB-targeting shRNA or siRNA molecule binds to a target RNA sequence that is 100% identical to an RNA sequence encoded by a DNA sequence defined by a set of genomic coordinates shown in Table 17 or Table 18. In some embodiments, the at least one CBLB-targeting shRNA or siRNA molecule binds to a target RNA sequence that is at least 95%, 96%, 97%, 98%, or 99% identical to an RNA sequence encoded by one of SEQ ID NOs: 798-823. In some embodiments, the at least one CBLB-targeting shRNA or siRNA molecule binds to a human target RNA sequence that is at least 95%, 96%, 97%, 98%, or 99% identical to a human RNA sequence encoded by one of SEQ ID NOs: 798-808. In some embodiments, the at least one CBLB-targeting shRNA or siRNA molecule binds to a target RNA sequence that is 100% identical to an RNA sequence encoded by one of SEQ ID NOs: 798-823. In some embodiments, the at least one CBLB-targeting shRNA or siRNA molecule binds to a human target RNA sequence that is 100% identical to a human RNA sequence encoded by one of SEQ ID NOs: 798-808.

TABLE 17
CBLB Human Genome Coordinates

| Target | Coordinates |
|---|---|
| CBLB | chr3: 105853475-105853494 |
| CBLB | chr3: 105853600-105853619 |
| CBLB | chr3: 105720111-105720130 |
| CBLB | chr3: 105867412-105867431 |
| CBLB | chr3: 105867529-105867548 |
| CBLB | chr3: 105720160-105720179 |
| CBLB | chr3: 105853421-105853440 |
| CBLB | chr3: 105751453-105751472 |
| CBLB | chr3: 105693541-105693560 |
| CBLB | chr3: 105867449-105867468 |
| CBLB | chr3: 105853514-105853533 |

TABLE 18
Cblb Mouse Genome Coordinates

| Target | Coordinates |
|---|---|
| Cblb | chr16: 52152499-52152518 |
| Cblb | chr16: 52139574-52139593 |
| Cblb | chr16: 52139603-52139622 |
| Cblb | chr16: 52112122-52112141 |
| Cblb | chr16: 52112134-52112153 |
| Cblb | chr16: 52152535-52152554 |
| Cblb | chr16: 52142891-52142910 |
| Cblb | chr16: 52135797-52135816 |
| Cblb | chr16: 52131105-52131124 |
| Cblb | chr16: 52112169-52112188 |
| Cblb | chr16: 52204542-52204561 |
| Cblb | chr16: 52131058-52131077 |
| Cblb | chr16: 52135876-52135895 |
| Cblb | chr16: 52135763-52135782 |
| Cblb | chr16: 52139509-52139528 |

[0392] In some embodiments, the nucleic acid-based gene-regulating system comprises at least one nucleic acid molecule (e.g., an siRNA, an shRNA, an RNA aptamer, or a morpholino), wherein the at least one nucleic acid molecule is a RC3H1-targeting nucleic acid molecule. In some embodiments, the at least one RC3H1-targeting nucleic acid molecule binds to a target RNA sequence that is at least 95%, 96%, 97%, 98%, or 99% identical to an RNA sequence encoded by the RC3H1 gene (SEQ ID NO: 9) or the Rc3h1 gene (SEQ ID NO: 10). In some embodiments, the at least one RC3H1-targeting nucleic acid molecule binds to a target RNA sequence that is 100% identical to an RNA sequence encoded by the RC3H1 gene (SEQ ID NO: 9) or the Rc3h1 gene (SEQ ID NO: 10). In some embodiments, the at least one RC3H1-targeting nucleic acid molecule is an siRNA or an shRNA molecule. In some embodiments, the at least one RC3H1-targeting siRNA or an shRNA molecule binds to a target RNA sequence that is at least 95%, 96%, 97%, 98%, or 99% identical to an RNA sequence encoded by the RC3H1 gene (SEQ ID NO: 9) or the Rc3h1 gene (SEQ ID NO: 10). In some embodiments, the at least one RC3H1-targeting siRNA or an shRNA molecule binds to a target RNA sequence that is 100% identical to an RNA sequence encoded by the RC3H1 gene (SEQ ID NO: 9) or the Rc3h1 gene (SEQ ID NO: 10).

[0393] In some embodiments, the at least one RC3H1-targeting nucleic acid molecule binds to a target RNA sequence that is at least 95%, 96%, 97%, 98%, or 99% identical to an RNA sequence encoded by a DNA sequence defined by a set of genomic coordinates shown in Table 19 (human genome) or Table 20 (mouse genome). In some embodiments, the at least one RC3H1-targeting nucleic acid molecule binds to a target RNA sequence that is 100% identical to an RNA sequence encoded by a DNA sequence defined by a set of genomic coordinates shown in Table 19 or Table 20. In some embodiments, the at least one RC3H1-targeting nucleic acid molecule binds to a target RNA sequence that is at least 95%, 96%, 97%, 98%, or 99% identical to an RNA sequence encoded by one of SEQ ID NOs: 824-844. In some embodiments, the at least one RC3H1-targeting nucleic acid molecule binds to a human target RNA sequence that is at least 95%, 96%, 97%, 98%, or 99% identical to a human RNA sequence encoded by one of SEQ ID NOs: 824-836. In some embodiments, the at least one RC3H1-targeting nucleic acid molecule binds to a target RNA sequence that is 100% identical to an RNA sequence encoded by one of SEQ ID NOs: 824-844. In some embodiments, the at least one RC3H1-targeting nucleic acid molecule binds to a human target RNA sequence that is 100% identical to a human RNA sequence encoded by one of SEQ ID NOs: 824-836.

[0394] In some embodiments, the at least one RC3H1-targeting nucleic acid molecule is a RC3H1-targeting shRNA or siRNA molecule. In some embodiments, the at least one RC3H1-targeting shRNA or siRNA molecule binds to a target RNA sequence that is at least 95%, 96%, 97%, 98%, or 99% identical to an RNA sequence encoded by a DNA sequence defined by a set of genomic coordinates shown in Table 19 or Table 20. In some embodiments, the at least one RC3H1-targeting shRNA or siRNA molecule binds to a target RNA sequence that is 100% identical to an RNA sequence encoded by a DNA sequence defined by a set of genomic coordinates shown in Table 19 or Table 20. In some embodiments, the at least one RC3H1-targeting shRNA or siRNA molecule binds to a target RNA sequence that is at least 95%, 96%, 97%, 98%, or 99% identical to an RNA sequence encoded by one of SEQ ID NOs: 824-844. In some embodiments, the at least one RC3H1-targeting shRNA or siRNA molecule binds to a human target RNA sequence that is at least 95%, 96%, 97%, 98%, or 99% identical to a human RNA sequence encoded by one of SEQ ID NOs: 824-836. In some embodiments, the at least one RC3H1-targeting shRNA or siRNA molecule binds to a target RNA sequence that is 100% identical to an RNA sequence encoded by one of SEQ ID NOs: 824-844. In some embodiments, the at least one RC3H1-targeting shRNA or siRNA molecule binds to a human target RNA sequence that is 100% identical to a human RNA sequence encoded by one of SEQ ID NOs: 824-836.

TABLE 19
RC3H1 Human Genome Coordinates

| Target | Coordinates |
|---|---|
| RC3H1 | chr1: 173946812-173946831 |
| RC3H1 | chr1: 173992926-173992945 |
| RC3H1 | chr1: 173980872-173980891 |
| RC3H1 | chr1: 173982779-173982798 |
| RC3H1 | chr1: 173980941-173980960 |
| RC3H1 | chr1: 173992844-173992863 |
| RC3H1 | chr1: 173992895-173992914 |
| RC3H1 | chr1: 173992882-173992901 |
| RC3H1 | chr1: 173961717-173961736 |
| RC3H1 | chr1: 173984495-173984514 |
| RC3H1 | chr1: 173980811-173980830 |
| RC3H1 | chr1: 173964926-173964945 |
| RC3H1 | chr1: 173982894-173982913 |

TABLE 20
Rc3h1 Mouse Genome Coordinates

| Target | Coordinates |
|---|---|
| Rc3h1 | chr1: 160930251-160930270 |
| Rc3h1 | chr1: 160930280-160930299 |
| Rc3h1 | chr1: 160930154-160930173 |
| Rc3h1 | chr1: 160942614-160942633 |
| Rc3h1 | chr1: 160930266-160930285 |
| Rc3h1 | chr1: 160930185-160930204 |
| Rc3h1 | chr1: 160938126-160938145 |
| Rc3h1 | chr1: 160930198-160930217 |

[0395] In some embodiments, the nucleic acid-based gene-regulating system comprises at least one nucleic acid molecule (e.g., an siRNA, an shRNA, an RNA aptamer, or a morpholino), wherein the at least one nucleic acid molecule is a NFKBIA-targeting nucleic acid molecule. In some embodiments, the at least one NFKBIA-targeting nucleic acid molecule binds to a target RNA sequence that is at least 95%, 96%, 97%, 98%, or 99% identical to an RNA sequence encoded by the NFKBIA gene (SEQ ID NO: 11) or the Nfkbia gene (SEQ ID NO: 12). In some embodiments, the at least one NFKBIA-targeting nucleic acid molecule binds to a target RNA sequence that is 100% identical to an RNA sequence encoded by the NFKBIA gene (SEQ ID NO: 11) or the Nfkbia gene (SEQ ID NO: 12). In some embodiments, the at least one NFKBIA-targeting nucleic acid molecule is an siRNA or an shRNA molecule. In some embodiments, the at least one NFKBIA-targeting siRNA or an shRNA molecule binds to a target RNA sequence that is at least 95%, 96%, 97%, 98%, or 99% identical to an RNA sequence encoded by the NFKBIA gene (SEQ ID NO: 11) or the Nfkbia gene (SEQ ID NO: 12). In some embodiments, the at least one NFKBIA-targeting siRNA or an shRNA molecule binds to a target RNA sequence that is 100% identical to an RNA sequence encoded by the NFKBIA gene (SEQ ID NO: 11) or the Nfkbia gene (SEQ ID NO: 12).

[0396] In some embodiments, the at least one NFKBIA-targeting nucleic acid molecule binds to a target RNA sequence that is at least 95%, 96%, 97%, 98%, or 99% identical to an RNA sequence encoded by a DNA sequence defined by a set of genomic coordinates shown in Table 21 or Table 22. In some embodiments, the at least one NFKBIA-targeting nucleic acid molecule binds to a target RNA sequence that is 100% identical to an RNA sequence encoded by a DNA sequence defined by a set of genomic coordinates shown in Table 21 (human genome) or Table 22 (mouse genome). In some embodiments, the at least one NFKBIA-targeting nucleic acid molecule binds to a target RNA sequence that is at least 95%, 96%, 97%, 98%, or 99% identical to an RNA sequence encoded by one of SEQ ID NOs: 845-875. In some embodiments, the at least one NFKBIA-targeting nucleic acid molecule binds to a human target RNA sequence that is at least 95%, 96%, 97%, 98%, or 99% identical to a human RNA sequence encoded by one of SEQ ID NOs: 845-856. In some embodiments, the at least one NFKBIA-targeting nucleic acid molecule binds to a target RNA sequence that is 100% identical to an RNA sequence encoded by one of SEQ ID NOs: 845-875. In some embodiments, the at least one NFKBIA-targeting nucleic acid molecule binds to a human target RNA sequence that is 100% identical to a human RNA sequence encoded by one of SEQ ID NOs: 845-856.

[0397] In some embodiments, the at least one NFKBIA-targeting nucleic acid molecule is a NFKBIA-targeting shRNA or siRNA molecule. In some embodiments, the at least one NFKBIA-targeting shRNA or siRNA molecule binds to a target RNA sequence that is at least 95%, 96%, 97%, 98%, or 99% identical to an RNA sequence encoded by a DNA sequence defined by a set of genomic coordinates shown in Table 21 or Table 22. In some embodiments, the at least one NFKBIA-targeting shRNA or siRNA molecule binds to a target RNA sequence that is 100% identical to an RNA sequence encoded by a DNA sequence defined by a set of genomic coordinates shown in Table 21 or Table 22. In some embodiments, the at least one NFKBIA-targeting shRNA or siRNA molecule binds to a target RNA sequence that is at least 95%, 96%, 97%, 98%, or 99% identical to an RNA sequence encoded by one of SEQ ID NOs: 845-875. In some embodiments, the at least one NFKBIA-targeting shRNA or siRNA molecule binds to a human target RNA sequence that is at least 95%, 96%, 97%, 98%, or 99% identical to a human RNA sequence encoded by one of SEQ ID NOs: 845-856. In some embodiments, the at least one NFKBIA-targeting shRNA or siRNA molecule binds to a target RNA sequence that is 100% identical to an RNA sequence encoded by one of SEQ ID NOs: 845-875. In some embodiments, the at least one NFKBIA-targeting shRNA or siRNA molecule binds to a human target RNA sequence that is 100% identical to a human RNA sequence encoded by one of SEQ ID NOs: 845-856.

TABLE 21
NFKBIA Human Genome Coordinates

| Target | Coordinates |
|---|---|
| NFKBIA | chr14: 35404635-35404654 |
| NFKBIA | chr14: 35402653-35402672 |
| NFKBIA | chr14: 35402494-35402513 |
| NFKBIA | chr14: 35404445-35404464 |
| NFKBIA | chr14: 35403152-35403171 |
| NFKBIA | chr14: 35403258-35403277 |
| NFKBIA | chr14: 35404463-35404482 |
| NFKBIA | chr14: 35403202-35403221 |
| NFKBIA | chr14: 35404411-35404430 |
| NFKBIA | chr14: 35402666-35402685 |
| NFKBIA | chr14: 35403330-35403349 |
| NFKBIA | chr14: 35403695-35403714 |

TABLE 22
Nfkbia Mouse Genome Coordinates

| Target | Coordinates |
|---|---|
| Nfkbia | chr12: 55491236-55491255 |
| Nfkbia | chr12: 55491172-55491191 |
| Nfkbia | chr12: 55491206-55491225 |
| Nfkbia | chr12: 55490633-55490652 |
| Nfkbia | chr12: 55491112-55491131 |
| Nfkbia | chr12: 55490800-55490819 |
| Nfkbia | chr12: 55490821-55490840 |
| Nfkbia | chr12: 55490526-55490545 |
| Nfkbia | chr12: 55491657-55491676 |
| Nfkbia | chr12: 55491177-55491196 |
| Nfkbia | chr12: 55491675-55491694 |
| Nfkbia | chr12: 55490773-55490792 |
| Nfkbia | chr12: 55490809-55490828 |
| Nfkbia | chr12: 55491735-55491754 |
| Nfkbia | chr12: 55490571-55490590 |
| Nfkbia | chr12: 55490588-55490607 |
| Nfkbia | chr12: 55491715-55491734 |
| Nfkbia | chr12: 55492316-55492335 |
| Nfkbia | chr12: 55491207-55491226 |

[0398] In some embodiments, the at least one SOCS1-, PTPN2-, ZC3H12A-, CBLB-, RC3H1- or NFKBIA-targeting siRNA molecule or shRNA molecule is obtained from commercial suppliers such as Sigma Aldrich®, Dharmacon®, ThermoFisher®, and the like. In some embodiments, the at least one SOCS1-, PTPN2-, or ZC3H12A-targeting siRNA molecule is one shown in Table 23. In some embodiments, the at least one SOCS2-, PTPN2-, or ZC3H12A-targeting shRNA molecule is one shown in Table 24.

TABLE 23
Exemplary SOCS1, PTPN2, ZC3H12A, RC3H1 and NFKBIA siRNAs

| Target Gene | siRNA construct |
|---|---|
| SOCS1 | MISSION ® esiRNA targeting mouse Socs1 (SigmaAldrich# EMU203261) |
| | Rosetta Predictions human (SigmaAldrich# NM_003745) |
| | Rosetta Predictions murine (SigmaAldrich# NM_009896) |
| PTPN2 | MISSION ® esiRNA human PTPN2 (esiRNA1) (SigmaAldrich# EHU113971) |
| | human Rosetta Predictions (SigmaAldrich# NM_002828) |
| | human Rosetta Predictions (SigmaAldrich# NM_080422) |
| | human Rosetta Predictions (SigmaAldrich# NM_080423) |
| | murine Rosetta Predictions (SigmaAldrich# NM_001127177) |
| ZC3H12A | MISSION ® esiRNA targeting human ZC3H12A (esiRNA1) (SigmaAldrich# |
| | EHU009491) |
| | MISSION ® esiRNA targeting mouse Zc3h12a (esiRNA1) (SigmaAldrich# |
| | EMU048551) |
| | Rosetta Predictions human (SigmaAldrich# NM_025079) |
| | Rosetta Predictions mouse (SigmaAldrich# NM_153159) |
| RC3H1 | MISSION ® esiRNA targeting mouse Cyth4 (SigmaAldrich# EHU032691) |
| NFKBIA | MISSION ® esiRNA targeting mouse Ephb4 (SigmaAldrich# EMU043721) |

TABLE 24
Exemplary SOCS1, PTPN2, ZC3H12A, RC3H1 and NFKBIA shRNAs

| Target Gene | shRNA construct |
|---|---|
| SOCS1 | MISSION ® shRNA Plasmid DNA human (SigmaAldrich# SHCLND- |
| | NM_003745) |
| | MISSION ® shRNA Plasmid DNA murine (SigmaAldrich# SHCLND- |
| | NM_009896) |
| PTPN2 | MISSION ® shRNA Plasmid human (SigmaAldrich# SHCLND-NM_002827) |
| | MISSION ® shRNA Plasmid murine (SigmaAldrich# SHCLND-NM_011201) |
| ZC3H12A | MISSION ® shRNA Plasmid DNA human (SigmaAldrich# SHCLND- |
| | NM_025079) |
| | MISSION ® shRNA Plasmid DNA mouse (SigmaAldrich# SHCLND- |
| | NM_153159) |
| RC3H1 | MISSION ® shRNA Plasmid DNA human (SigmaAldrich# SHCLND- |
| | NM_172071) |
| NFKBIA | MISSION ® shRNA Plasmid DNA human (SigmaAldrich# SHCLND- |
| | NM_020529) |

[0399] In some embodiments, the nucleic acid-based gene-regulating system comprises at least two nucleic acid molecules (e.g., an siRNA, an shRNA, an RNA aptamer, or a morpholino), wherein at least one nucleic acid molecule is a SOCS1-targeting nucleic acid molecule and at least one nucleic acid molecule is a PTPN2-targeting nucleic acid molecule. In some embodiments, the at least one SOCS1-targeting nucleic acid molecule binds to a target RNA sequence that is at least 95%, 96%, 97%, 98%, or 99% identical to an RNA sequence encoded by the SOCS1 gene (SEQ ID NO: 1) or the Socs1 gene (SEQ ID NO: 2) and the at least one PTPN2-targeting nucleic acid molecule binds to a target RNA sequence that is at least 95%, 96%, 97%, 98%, or 99% identical to an RNA sequence encoded by the PTPN2 gene (SEQ ID NO: 3) or the Ptpn2 gene (SEQ ID NO: 4). In some embodiments, the at least one SOCS1-targeting nucleic acid molecule binds to a target RNA sequence that is 100% identical to an RNA sequence encoded by the SOCS1 gene (SEQ ID NO: 1) or the Socs1 gene (SEQ ID NO: 2) and the at least one PTPN2-targeting nucleic acid molecule binds to a target RNA sequence that is 100% identical to an RNA sequence encoded by the PTPN2 gene (SEQ ID NO: 3) or the Ptpn2 gene (SEQ ID NO: 4).

[0400] In some embodiments, the at least one SOCS1-targeting nucleic acid molecule binds to a target RNA sequence that is at least 95%, 96%, 97%, 98%, or 99% identical to an RNA sequence encoded by a DNA sequence defined by a set of genomic coordinates shown in Table 4 or Table 5 and the at least one PTPN2-targeting nucleic acid molecule binds to a target RNA sequence that is at least 95%, 96%, 97%, 98%, or 99% identical to an RNA sequence encoded by a DNA sequence defined by a set of genomic coordinates shown in Table 9 or Table 10. In some embodiments, the at least one SOCS1-targeting nucleic acid molecule binds to a target RNA sequence that is 100% identical to an RNA sequence encoded by a DNA sequence defined by a set of genomic coordinates shown in Table 4 or Table 5 and the at least one PTPN2-targeting nucleic acid molecule binds to a target RNA sequence that is 100% identical to an RNA sequence encoded by a DNA sequence defined by a set of genomic coordinates shown in Table 9 or Table 10.

[0401] In some embodiments, the at least one SOCS1-targeting nucleic acid molecule binds to a target RNA sequence that is at least 95%, 96%, 97%, 98%, or 99% identical to an RNA sequence encoded by one of SEQ ID NOs: 23-200 or 23-55 and the at least one PTPN2-targeting nucleic acid molecule binds to a target RNA sequence that is at least 95%, 96%, 97%, 98%, or 99% identical to an RNA sequence encoded by one of SEQ ID NOs: 201-327. In some embodiments, the at least one SOCS1-targeting nucleic acid molecule binds to a target RNA sequence that is 100% identical to an RNA sequence encoded by one of SEQ ID NOs: 23-200 or 23-55 and the at least one PTPN2-targeting nucleic acid molecule binds to a target RNA sequence that is 100% identical to an RNA sequence encoded by one of SEQ ID NOs: 201-327.

[0402] In some embodiments, the nucleic acid-based gene-regulating system comprises at least two siRNA or shRNA molecules, wherein at least one siRNA or shRNA molecule is a SOCS1-targeting siRNA or shRNA molecule and at least one siRNA or shRNA molecule is a PTPN2-targeting siRNA or shRNA molecule. In some embodiments, the at least one SOCS1-targeting nucleic acid molecule is an siRNA or an shRNA molecule and at least one PTPN2-targeting nucleic acid molecule is an siRNA or shRNA molecule. In some embodiments, the at least one SOCS1-targeting siRNA or an shRNA molecule binds to a target RNA sequence that is at least 95%, 96%, 97%, 98%, or 99% identical to an RNA sequence encoded by the SOCS1 gene (SEQ ID NO: 1) or the Socs1 gene (SEQ ID NO: 2) and the at least one PTPN2-targeting siRNA or shRNA molecule binds to a target RNA sequence that is at least 95%, 96%, 97%, 98%, or 99% identical to an RNA sequence encoded by the PTPN2 gene (SEQ ID NO: 3) or the Ptpn2 gene (SEQ ID NO: 4). In some embodiments, the at least one SOCS1-targeting siRNA or an shRNA molecule binds to a target RNA sequence that is 100% identical to an RNA sequence encoded by the SOCS1 gene (SEQ ID NO: 1) or the Socs1 gene (SEQ ID NO: 2) and the at least one PTPN2-targeting siRNA or shRNA molecule binds to a target RNA sequence that is 100% identical to an RNA sequence encoded by the PTPN2 gene (SEQ ID NO: 3) or the Ptpn2 gene (SEQ ID NO: 4).

[0403] In some embodiments, the at least one SOCS1-targeting siRNA or shRNA molecule binds to a target RNA sequence that is at least 95%, 96%, 97%, 98%, or 99% identical to an RNA sequence encoded by a DNA sequence defined by a set of genomic coordinates shown in Table 4 or Table 5 and the at least one PTPN2-targeting siRNA or shRNA molecule binds to a target RNA sequence that is at least 95%, 96%, 97%, 98%, or 99% identical to an RNA sequence encoded by a DNA sequence defined by a set of genomic coordinates shown in Table 9 or Table 10. In some embodiments, the at least one SOCS1-targeting siRNA or shRNA molecule binds to a target RNA sequence that is 100% identical to an RNA sequence encoded by a DNA sequence defined by a set of genomic coordinates shown in Table 4 or Table 5 and the at least one PTPN2-targeting siRNA or shRNA molecule binds to a target RNA sequence that is 100% identical to an RNA sequence encoded by a DNA sequence defined by a set of genomic coordinates shown in Table 9 or Table 10.

[0404] In some embodiments, the at least one SOCS1-targeting siRNA or shRNA molecule binds to a target RNA sequence that is at least 95%, 96%, 97%, 98%, or 99% identical to an RNA sequence encoded by one of SEQ ID NOs: 23-200 or 23-55 and the at least one PTPN2-targeting siRNA or shRNA molecule binds to a target RNA sequence that is at least 95%, 96%, 97%, 98%, or 99% identical to an RNA sequence encoded by one of SEQ ID NOs: 201-327. In some embodiments, the at least one SOCS1-targeting siRNA or shRNA molecule binds to a target RNA sequence that is 100% identical to an RNA sequence encoded by one of SEQ ID NOs: 23-200 or 23-55 and the at least one PTPN2-targeting siRNA or shRNA molecule binds to a target RNA sequence that is 100% identical to an RNA sequence encoded by one of SEQ ID NOs: 201-327.

[0405] In some embodiments, the nucleic acid-based gene-regulating system comprises at least two nucleic acid molecules (e.g., an siRNA, an shRNA, an RNA aptamer, or a morpholino), wherein at least one nucleic acid molecule is a SOCS1-targeting nucleic acid molecule and at least one nucleic acid molecule is a ZC3H12A-targeting nucleic acid molecule. In some embodiments, the at least one SOCS1-targeting nucleic acid molecule binds to a target RNA sequence that is at least 95%, 96%, 97%, 98%, or 99% identical to an RNA sequence encoded by the SOCS1 gene (SEQ ID NO: 1) or the Socs1 gene (SEQ ID NO: 2) and the at least one ZC3H12A-targeting nucleic acid molecule binds to a target RNA sequence that is at least 95%, 96%, 97%, 98%, or 99% identical to an RNA sequence encoded by the ZC3H12A gene (SEQ ID NO: 5) or the Zc3h12a gene (SEQ ID NO: 6). In some embodiments, the at least one SOCS1-targeting nucleic acid molecule binds to a target RNA sequence that is 100% identical to an RNA sequence encoded by the SOCS1 gene (SEQ ID NO: 1) or the Socs1 gene (SEQ ID NO: 2) and the at least one ZC3H12A-targeting nucleic acid molecule binds to a target RNA sequence that is 100% identical to an RNA sequence encoded by the ZC3H12A gene (SEQ ID NO: 5) or the Zc3h12a gene (SEQ ID NO: 6).

[0406] In some embodiments, the at least one SOCS1-targeting nucleic acid molecule binds to a target RNA sequence that is at least 95%, 96%, 97%, 98%, or 99% identical to an RNA sequence encoded by a DNA sequence defined by a set of genomic coordinates shown in Table 4 or Table 5 and the at least one ZC3H12A-targeting nucleic acid molecule binds to a target RNA sequence that is at least 95%, 96%, 97%, 98%, or 99% identical to an RNA sequence encoded by a DNA sequence defined by a set of genomic coordinates shown in Table 11 or Table 12. In some embodiments, the at least one SOCS1-targeting nucleic acid molecule binds to a target RNA sequence that is 100% identical to an RNA sequence encoded by a DNA sequence defined by a set of genomic coordinates shown in Table 4 or Table 5 and the at least one ZC3H12A-targeting nucleic acid molecule binds to a target RNA sequence that is 100% identical to an RNA sequence encoded by a DNA sequence defined by a set of genomic coordinates shown in Table 11 or Table 12.

[0407] In some embodiments, the at least one SOCS1-targeting nucleic acid molecule binds to a target RNA sequence that is at least 95%, 96%, 97%, 98%, or 99% identical to an RNA sequence encoded by one of SEQ ID NOs: 23-200 or 23-55 and the at least one ZC3H12A-targeting nucleic acid molecule binds to a target RNA sequence that is at least 95%, 96%, 97%, 98%, or 99% identical to an RNA sequence encoded by one of SEQ ID NOs: 331-797 or 331-337. In some embodiments, the at least one SOCS1-targeting nucleic acid molecule binds to a target RNA sequence that is 100% identical to an RNA sequence encoded by one of SEQ ID NOs: 23-200 or 23-55 and the at least one ZC3H12A-targeting nucleic acid molecule binds to a target RNA sequence that is 100% identical to an RNA sequence encoded by one of SEQ ID NOs: 331-797 or 331-337.

[0408] In some embodiments, the nucleic acid-based gene-regulating system comprises at least two siRNA or shRNA molecules, wherein at least one siRNA or shRNA molecule is a SOCS1-targeting siRNA or shRNA molecule and at least one siRNA or shRNA molecule is a ZC3H12A-targeting siRNA or shRNA molecule. In some embodiments, the at least one SOCS1-targeting nucleic acid molecule is an siRNA or an shRNA molecule and at least one ZC3H12A-targeting nucleic acid molecule is an siRNA or shRNA molecule. In some embodiments, the at least one SOCS1-targeting siRNA or an shRNA molecule binds to a target RNA sequence that is at least 95%, 96%, 97%, 98%, or 99% identical to an RNA sequence encoded by the SOCS1 gene (SEQ ID NO: 1) or the Socs1 gene (SEQ ID NO: 2) and the at least one ZC3H12A-targeting siRNA or shRNA molecule binds to a target RNA sequence that is at least 95%, 96%, 97%, 98%, or 99% identical to an RNA sequence encoded by the ZC3H12A gene (SEQ ID NO: 5) or the Zc3h12a gene (SEQ ID NO: 6). In some embodiments, the at least one SOCS1-targeting siRNA or an shRNA molecule binds to a target RNA sequence that is 100% identical to an RNA sequence encoded by the SOCS1 gene (SEQ ID NO: 1) or the Socs1 gene (SEQ ID NO: 2) and the at least one ZC3H12A-targeting siRNA or shRNA molecule binds to a target RNA sequence that is 100% identical to an RNA sequence encoded by the ZC3H12A gene (SEQ ID NO: 5) or the Zc3h12a gene (SEQ ID NO: 6).

[0409] In some embodiments, the at least one SOCS1-targeting siRNA or shRNA molecule binds to a target RNA sequence that is at least 95%, 96%, 97%, 98%, or 99% identical to an RNA sequence encoded by a DNA sequence defined by a set of genomic coordinates shown in Table 4 or Table 5 and the at least one ZC3H12A-targeting siRNA or shRNA molecule binds to a target RNA sequence that is at least 95%, 96%, 97%, 98%, or 99% identical to an RNA sequence encoded by a DNA sequence defined by a set of genomic coordinates shown in Table 11 or Table 12. In some embodiments, the at least one SOCS1-targeting siRNA or shRNA molecule binds to a target RNA sequence that is 100% identical to an RNA sequence encoded by a DNA sequence defined by a set of genomic coordinates shown in Table 4 or Table 5 and the at least one ZC3H12A-targeting siRNA or shRNA molecule binds to a target RNA sequence that is 100% identical to an RNA sequence encoded by a DNA sequence defined by a set of genomic coordinates shown in Table 11 or Table 12.

[0410] In some embodiments, the at least one SOCS1-targeting siRNA or shRNA molecule binds to a target RNA sequence that is at least 95%, 96%, 97%, 98%, or 99% identical to an RNA sequence encoded by one of SEQ ID NOs: 23-200 or 23-55 and the at least one ZC3H12A-targeting siRNA or shRNA molecule binds to a target RNA sequence that is at least 95%, 96%, 97%, 98%, or 99% identical to an RNA sequence encoded by one of SEQ ID NOs: 331-797 or 331-337. In some embodiments, the at least one SOCS1-targeting siRNA or shRNA molecule binds to a target RNA sequence that is 100% identical to an RNA sequence encoded by one of SEQ ID NOs: 23-200 or 23-55 and the at least one ZC3H12A-targeting siRNA or shRNA molecule binds to a target RNA sequence that is 100% identical to an RNA sequence encoded by one of SEQ ID NOs: 331-797 or 331-337.

[0411] In some embodiments, the nucleic acid-based gene-regulating system comprises at least two nucleic acid molecules (e.g., an siRNA, an shRNA, an RNA aptamer, or a morpholino), wherein at least one nucleic acid molecule is a PTPN2-targeting nucleic acid molecule and at least one nucleic acid molecule is a ZC3H12A-targeting nucleic acid molecule. In some embodiments, the at least one PTPN2-targeting nucleic acid molecule binds to a target RNA sequence that is at least 95%, 96%, 97%, 98%, or 99% identical to an RNA sequence encoded by the PTPN2 gene (SEQ ID NO: 3) or the Ptpn2 gene (SEQ ID NO: 4) and the at least one ZC3H12A-targeting nucleic acid molecule binds to a target RNA sequence that is at least 95%, 96%, 97%, 98%, or 99% identical to an RNA sequence encoded by the ZC3H12A gene (SEQ ID NO: 5) or the Zc3h12a gene (SEQ ID NO: 6). In some embodiments, the at least one PTPN2-targeting nucleic acid molecule binds to a target RNA sequence that is 100% identical to an RNA sequence encoded by the PTPN2 gene (SEQ ID NO: 3) or the Ptpn2 gene (SEQ ID NO: 4) and the at least one ZC3H12A-targeting nucleic acid molecule binds to a target RNA sequence that is 100% identical to an RNA sequence encoded by the ZC3H12A gene (SEQ ID NO: 5) or the Zc3h12a gene (SEQ ID NO: 6).

[0412] In some embodiments, the at least one PTPN2-targeting nucleic acid molecule binds to a target RNA sequence that is at least 95%, 96%, 97%, 98%, or 99% identical to an RNA sequence encoded by a DNA sequence defined by a set of genomic coordinates shown in Table 9 or Table 10 and the at least one ZC3H12A-targeting nucleic acid molecule binds to a target RNA sequence that is at least 95%, 96%, 97%, 98%, or 99% identical to an RNA sequence encoded by a DNA sequence defined by a set of genomic coordinates shown in Table 11 or Table 12. In some embodiments, the at least one PTPN2-targeting nucleic acid molecule binds to a target RNA sequence that is 100% identical to an RNA sequence encoded by a DNA sequence defined by a set of genomic coordinates shown in Table 9 or Table 10 and the at least one ZC3H12A-targeting nucleic acid molecule binds to a target RNA sequence that is 100% identical to an RNA sequence encoded by a DNA sequence defined by a set of genomic coordinates shown in Table 11 or Table 12.

[0413] In some embodiments, the at least one PTPN2-targeting nucleic acid molecule binds to a target RNA sequence that is at least 95%, 96%, 97%, 98%, or 99% identical to an RNA sequence encoded by one of SEQ ID NOs: 201-327 and the at least one ZC3H12A-targeting nucleic acid molecule binds to a target RNA sequence that is at least 95%, 96%, 97%, 98%, or 99% identical to an RNA sequence encoded by one of SEQ ID NOs: 331-797 or 331-337. In some embodiments, the at least one PTPN2-targeting nucleic acid molecule binds to a target RNA sequence that is 100% identical to an RNA sequence encoded by one of SEQ ID NOs: 201-327 and the at least one ZC3H12A-targeting nucleic acid molecule binds to a target RNA sequence that is 100% identical to an RNA sequence encoded by one of SEQ ID NOs: 331-797 or 331-337.

[0414] In some embodiments, the nucleic acid-based gene-regulating system comprises at least two siRNA or shRNA molecules, wherein at least one siRNA or shRNA molecule is a PTPN2-targeting siRNA or shRNA molecule and at least one siRNA or shRNA molecule is a ZC3H12A-targeting siRNA or shRNA molecule. In some embodiments, the at least one PTPN2-targeting siRNA or an shRNA molecule binds to a target RNA sequence that is at least 95%, 96%, 97%, 98%, or 99% identical to an RNA sequence encoded by the PTPN2 gene (SEQ ID NO: 3) or the Ptpn2 gene (SEQ ID NO: 4) and the at least one ZC3H12A-targeting siRNA or shRNA molecule binds to a target RNA sequence that is at least 95%, 96%, 97%, 98%, or 99% identical to an RNA sequence encoded by the ZC3H12A gene (SEQ ID NO: 5) or the Zc3h12a gene (SEQ ID NO: 6). In some embodiments, the at least one PTPN2-targeting siRNA or an shRNA molecule binds to a target RNA sequence that is 100% identical to an RNA sequence encoded by the PTPN2 gene (SEQ ID NO: 3) or the Ptpn2 gene (SEQ ID NO: 4) and the at least one ZC3H12A-targeting siRNA or shRNA molecule binds to a target RNA sequence that is 100% identical to an RNA sequence encoded by the ZC3H12A gene (SEQ ID NO: 5) or the Zc3h12a gene (SEQ ID NO: 6).

[0415] In some embodiments, the at least one PTPN2-targeting siRNA or shRNA molecule binds to a target RNA sequence that is at least 95%, 96%, 97%, 98%, or 99% identical to an RNA sequence encoded by a DNA sequence defined by a set of genomic coordinates shown in Table 9 or Table 10 and the at least one ZC3H12A-targeting siRNA or shRNA molecule binds to a target RNA sequence that is at least 95%, 96%, 97%, 98%, or 99% identical to an RNA sequence encoded by a DNA sequence defined by a set of genomic coordinates shown in Table 11 or Table 12. In some embodiments, the at least one PTPN2-targeting siRNA or shRNA molecule binds to a target RNA sequence that is 100% identical to an RNA sequence encoded by a DNA sequence defined by a set of genomic coordinates shown in Table 9 or Table 10 and the at least one ZC3H12A-targeting siRNA or shRNA molecule binds to a target RNA sequence that is 100% identical to an RNA sequence encoded by a DNA sequence defined by a set of genomic coordinates shown in Table 11 or Table 12.

[0416] In some embodiments, the at least one PTPN2-targeting siRNA or shRNA molecule binds to a target RNA sequence that is at least 95%, 96%, 97%, 98%, or 99% identical to an RNA sequence encoded by one of SEQ ID NOs: 201-327 and the at least one ZC3H12A-targeting siRNA or shRNA molecule binds to a target RNA sequence that is at least 95%, 96%, 97%, 98%, or 99% identical to an RNA sequence encoded by one of SEQ ID NOs: 331-797 or 331-337. In some embodiments, the at least one PTPN2-targeting siRNA or shRNA molecule binds to a target RNA sequence that is 100% identical to an RNA sequence encoded by one of SEQ ID NOs: 201-327 and the at least one ZC3H12A-targeting siRNA or shRNA molecule binds to a target RNA sequence that is 100% identical to an RNA sequence encoded by one of SEQ ID NOs: 331-797 or 331-337.

[0417] In some embodiments, the nucleic acid-based gene-regulating system comprises at least two nucleic acid molecules (e.g., an siRNA, an shRNA, an RNA aptamer, or a morpholino), wherein at least one nucleic acid molecule is a CBLB-targeting nucleic acid molecule and at least one nucleic acid molecule is a PTPN2-targeting nucleic acid molecule. In some embodiments, the at least one CBLB-targeting nucleic acid molecule binds to a target RNA sequence that is at least 95%, 96%, 97%, 98%, or 99% identical to an RNA sequence encoded by the CBLB gene (SEQ ID NO: 7) or the CBLB gene (SEQ ID NO: 8) and the at least one PTPN2-targeting nucleic acid molecule binds to a target RNA sequence that is at least 95%, 96%, 97%, 98%, or 99% identical to an RNA sequence encoded by the PTPN2 gene (SEQ ID NO: 3) or the Ptpn2 gene (SEQ ID NO: 4). In some embodiments, the at least one CBLB-targeting nucleic acid molecule binds to a target RNA sequence that is 100% identical to an RNA sequence encoded by the CBLB gene (SEQ ID NO: 7) or the Cblb gene (SEQ ID NO: 8) and the at least one PTPN2-targeting nucleic acid molecule binds to a target RNA sequence that is 100% identical to an RNA sequence encoded by the PTPN2 gene (SEQ ID NO: 3) or the Ptpn2 gene (SEQ ID NO: 4).

[0418] In some embodiments, the at least one CBLB-targeting nucleic acid molecule binds to a target RNA sequence that is at least 95%, 96%, 97%, 98%, or 99% identical to an RNA sequence encoded by a DNA sequence defined by a set of genomic coordinates shown in Table 17 or Table 18 and the at least one PTPN2-targeting nucleic acid molecule binds to a target RNA sequence that is at least 95%, 96%, 97%, 98%, or 99% identical to an RNA sequence encoded by a DNA sequence defined by a set of genomic coordinates shown in Table 9 or Table 10. In some embodiments, the at least one CBLB-targeting nucleic acid molecule binds to a target RNA sequence that is 100% identical to an RNA sequence encoded by a DNA sequence defined by a set of genomic coordinates shown in Table 17 or Table 18 and the at least one PTPN2-targeting nucleic acid molecule binds to a target RNA sequence that is 100% identical to an RNA sequence encoded by a DNA sequence defined by a set of genomic coordinates shown in Table 9 or Table 10.

[0419] In some embodiments, the at least one CBLB-targeting nucleic acid molecule binds to a target RNA sequence that is at least 95%, 96%, 97%, 98%, or 99% identical to an RNA sequence encoded by one of SEQ ID NOs: 798-823 and the at least one PTPN2-targeting nucleic acid molecule binds to a target RNA sequence that is at least 95%, 96%, 97%, 98%, or 99% identical to an RNA sequence encoded by one of SEQ ID NOs: 201-327. In some embodiments, the at least one CBLB-targeting nucleic acid molecule binds to a target RNA sequence that is 100% identical to an RNA sequence encoded by one of SEQ ID NOs: 798-823 and the at least one PTPN2-targeting nucleic acid molecule binds to a target RNA sequence that is 100% identical to an RNA sequence encoded by one of SEQ ID NOs: 201-327.

[0420] In some embodiments, the nucleic acid-based gene-regulating system comprises at least two siRNA or shRNA molecules, wherein at least one siRNA or shRNA molecule is a CBLB-targeting siRNA or shRNA molecule and at least one siRNA or shRNA molecule is a PTPN2-targeting siRNA or shRNA molecule. In some embodiments, the at least one CBLB-targeting nucleic acid molecule is an siRNA or an shRNA molecule and at least one PTPN2-targeting nucleic acid molecule is an siRNA or shRNA molecule. In some embodiments, the at least one CBLB-targeting siRNA or an shRNA molecule binds to a target RNA sequence that is at least 95%, 96%, 97%, 98%, or 99% identical to an RNA sequence encoded by the CBLB gene (SEQ ID NO: 7) or the Cblb gene (SEQ ID NO: 8) and the at least one PTPN2-targeting siRNA or shRNA molecule binds to a target RNA sequence that is at least 95%, 96%, 97%, 98%, or 99% identical to an RNA sequence encoded by the PTPN2 gene (SEQ ID NO: 3) or the Ptpn2 gene (SEQ ID NO: 4). In some embodiments, the at least one CBLB-targeting siRNA or an shRNA molecule binds to a target RNA sequence that is 100% identical to an RNA sequence encoded by the CBLB gene (SEQ ID NO: 7) or the Cblb gene (SEQ ID NO: 8) and the at least one PTPN2-targeting siRNA or shRNA molecule binds to a target RNA sequence that is 100% identical to an RNA sequence encoded by the PTPN2 gene (SEQ ID NO: 3) or the Ptpn2 gene (SEQ ID NO: 4).

[0421] In some embodiments, the at least one CBLB-targeting siRNA or shRNA molecule binds to a target RNA sequence that is at least 95%, 96%, 97%, 98%, or 99% identical to an RNA sequence encoded by a DNA sequence defined by a set of genomic coordinates shown in Table 17 or Table 18 and the at least one PTPN2-targeting siRNA or shRNA molecule binds to a target RNA sequence that is at least 95%, 96%, 97%, 98%, or 99% identical to an RNA sequence encoded by a DNA sequence defined by a set of genomic coordinates shown in Table 9 or Table 10. In some embodiments, the at least one CBLB-targeting siRNA or shRNA molecule binds to a target RNA sequence that is 100% identical to an RNA sequence encoded by a DNA sequence defined by a set of genomic coordinates shown in Table 17 or Table 18 and the at least one PTPN2-targeting siRNA or shRNA molecule binds to a target RNA sequence that is 100% identical to an RNA sequence encoded by a DNA sequence defined by a set of genomic coordinates shown in Table 9 or Table 10.

[0422] In some embodiments, the at least one CBLB-targeting siRNA or shRNA molecule binds to a target RNA sequence that is at least 95%, 96%, 97%, 98%, or 99% identical to an RNA sequence encoded by one of SEQ ID NOs: 798-823 and the at least one PTPN2-targeting siRNA or shRNA molecule binds to a target RNA sequence that is at least 95%, 96%, 97%, 98%, or 99% identical to an RNA sequence encoded by one of SEQ ID NOs: 201-327. In some embodiments, the at least one CBLB-targeting siRNA or shRNA molecule binds to a target RNA sequence that is 100% identical to an RNA sequence encoded by one of SEQ ID NOs: 798-823 and the at least one PTPN2-targeting siRNA or shRNA molecule binds to a target RNA sequence that is 100% identical to an RNA sequence encoded by one of SEQ ID NOs: 201-327.

[0423] In some embodiments, the nucleic acid-based gene-regulating system comprises at least two nucleic acid molecules (e.g., an siRNA, an shRNA, an RNA aptamer, or a morpholino), wherein at least one nucleic acid molecule is a CBLB-targeting nucleic acid molecule and at least one nucleic acid molecule is a ZC3H12A-targeting nucleic acid molecule. In some embodiments, the at least one CBLB-targeting nucleic acid molecule binds to a target RNA sequence that is at least 95%, 96%, 97%, 98%, or 99% identical to an RNA sequence encoded by the CBLB gene (SEQ ID NO: 7) or the Cblb gene (SEQ ID NO: 8) and the at least one ZC3H12A-targeting nucleic acid molecule binds to a target RNA sequence that is at least 95%, 96%, 97%, 98%, or 99% identical to an RNA sequence encoded by the ZC3H12A gene (SEQ ID NO: 5) or the Zc3h12a gene (SEQ ID NO: 6). In some embodiments, the at least one CBLB-targeting nucleic acid molecule binds to a target RNA sequence that is 100% identical to an RNA sequence encoded by the CBLB gene (SEQ ID NO: 7) or the Cblb gene (SEQ ID NO: 8) and the at least one ZC3H12A-targeting nucleic acid molecule binds to a target RNA sequence that is 100% identical to an RNA sequence encoded by the ZC3H12A gene (SEQ ID NO: 5) or the Zc3h12a gene (SEQ ID NO: 6).

[0424] In some embodiments, the at least one CBLB-targeting nucleic acid molecule binds to a target RNA sequence that is at least 95%, 96%, 97%, 98%, or 99% identical to an RNA sequence encoded by a DNA sequence defined by a set of genomic coordinates shown in Table 17 or Table 18 and the at least one ZC3H12A-targeting nucleic acid molecule binds to a target RNA sequence that is at least 95%, 96%, 97%, 98%, or 99% identical to an RNA sequence encoded by a DNA sequence defined by a set of genomic coordinates shown in Table 11 or Table 12. In some embodiments, the at least one CBLB-targeting nucleic acid molecule binds to a target RNA sequence that is 100% identical to an RNA sequence encoded by a DNA sequence defined by a set of genomic coordinates shown in Table 17 or Table 18 and the at least one ZC3H12A-targeting nucleic acid molecule binds to a target RNA sequence that is 100% identical to an RNA sequence encoded by a DNA sequence defined by a set of genomic coordinates shown in Table 11 or Table 12.

[0425] In some embodiments, the at least one CBLB-targeting nucleic acid molecule binds to a target RNA sequence that is at least 95%, 96%, 97%, 98%, or 99% identical to an RNA sequence encoded by one of SEQ ID NOs: 798-823 and the at least one ZC3H12A-targeting nucleic acid molecule binds to a target RNA sequence that is at least 95%, 96%, 97%, 98%, or 99% identical to an RNA sequence encoded by one of SEQ ID NOs: 331-797 or 331-337. In some embodiments, the at least one CBLB-targeting nucleic acid molecule binds to a target RNA sequence that is 100% identical to an RNA sequence encoded by one of SEQ ID NOs: 798-823 and the at least one ZC3H12A-targeting nucleic acid molecule binds to a target RNA sequence that is 100% identical to an RNA sequence encoded by one of SEQ ID NOs: 331-797 or 331-337.

[0426] In some embodiments, the nucleic acid-based gene-regulating system comprises at least two siRNA or shRNA molecules, wherein at least one siRNA or shRNA molecule is a CBLB-targeting siRNA or shRNA molecule and at least one siRNA or shRNA molecule is a ZC3H12A-targeting siRNA or shRNA molecule. In some embodiments, the at least one CBLB-targeting nucleic acid molecule is an siRNA or an shRNA molecule and at least one ZC3H12A-targeting nucleic acid molecule is an siRNA or shRNA molecule. In some embodiments, the at least one CBLB-targeting siRNA or an shRNA molecule binds to a target RNA sequence that is at least 95%, 96%, 97%, 98%, or 99% identical to an RNA sequence encoded by the CBLB gene (SEQ ID NO: 7) or the Cblb gene (SEQ ID NO: 8) and the at least one ZC3H12A-targeting siRNA or shRNA molecule binds to a target RNA sequence that is at least 95%, 96%, 97%, 98%, or 99% identical to an RNA sequence encoded by the ZC3H12A gene (SEQ ID NO: 5) or the Zc3h12a gene (SEQ ID NO: 6). In some embodiments, the at least one CBLB-targeting siRNA or an shRNA molecule binds to a target RNA sequence that is 100% identical to an RNA sequence encoded by the CBLB gene (SEQ ID NO: 7) or the Cblb gene (SEQ ID NO: 8) and the at least one ZC3H12A-targeting siRNA or shRNA molecule binds to a target RNA sequence that is 100% identical to an RNA sequence encoded by the ZC3H12A gene (SEQ ID NO: 5) or the Zc3h12a gene (SEQ ID NO: 6).

[0427] In some embodiments, the at least one CBLB-targeting siRNA or shRNA molecule binds to a target RNA sequence that is at least 95%, 96%, 97%, 98%, or 99% identical to an RNA sequence encoded by a DNA sequence defined by a set of genomic coordinates shown in Table 17 or Table 18 and the at least one ZC3H12A-targeting siRNA or shRNA molecule binds to a target RNA sequence that is at least 95%, 96%, 97%, 98%, or 99% identical to an RNA sequence encoded by a DNA sequence defined by a set of genomic coordinates shown in Table 11 or Table 12. In some embodiments, the at least one CBLB-targeting siRNA or shRNA molecule binds to a target RNA sequence that is 100% identical to an RNA sequence encoded by a DNA sequence defined by a set of genomic coordinates shown in Table 17 or Table 18 and the at least one ZC3H12A-targeting siRNA or shRNA molecule binds to a target RNA sequence that is 100% identical to an RNA sequence encoded by a DNA sequence defined by a set of genomic coordinates shown in Table 11 or Table 12.

[0428] In some embodiments, the at least one CBLB-targeting siRNA or shRNA molecule binds to a target RNA sequence that is at least 95%, 96%, 97%, 98%, or 99% identical to an RNA sequence encoded by one of SEQ ID NOs: 798-823 and the at least one ZC3H12A-targeting siRNA or shRNA molecule binds to a target RNA sequence that is at least 95%, 96%, 97%, 98%, or 99% identical to an RNA sequence encoded by one of SEQ ID NOs: 331-797 or 331-337. In some embodiments, the at least one CBLB-targeting siRNA or shRNA molecule binds to a target RNA sequence that is 100% identical to an RNA sequence encoded by one of SEQ ID NOs: 798-823 and the at least one ZC3H12A-targeting siRNA or shRNA molecule binds to a target RNA sequence that is 100% identical to an RNA sequence encoded by one of SEQ ID NOs: 331-797 or 331-337.

[0429] In some embodiments, the nucleic acid-based gene-regulating system comprises at least two nucleic acid molecules (e.g., an siRNA, an shRNA, an RNA aptamer, or a morpholino), wherein at least one nucleic acid molecule is a SOCS1-targeting nucleic acid molecule and at least one nucleic acid molecule is a CBLB-targeting nucleic acid molecule. In some embodiments, the at least one SOCS1-targeting nucleic acid molecule binds to a target RNA sequence that is at least 95%, 96%, 97%, 98%, or 99% identical to an RNA sequence encoded by the SOCS1 gene (SEQ ID NO: 1) or the Socs1 gene (SEQ ID NO: 2) and the at least one CBLB-targeting nucleic acid molecule binds to a target RNA sequence that is at least 95%, 96%, 97%, 98%, or 99% identical to an RNA sequence encoded by the CBLB gene (SEQ ID NO: 7) or the Cblb gene (SEQ ID NO: 8). In some embodiments, the at least one SOCS1-targeting nucleic acid molecule binds to a target RNA sequence that is 100% identical to an RNA sequence encoded by the SOCS1 gene (SEQ ID NO: 1) or the Socs1 gene (SEQ ID NO: 2) and the at least one CBLB-targeting nucleic acid molecule binds to a target RNA sequence that is 100% identical to an RNA sequence encoded by the CBLB gene (SEQ ID NO: 7) or the Cblb gene (SEQ ID NO: 8).

[0430] In some embodiments, the at least one SOCS1-targeting nucleic acid molecule binds to a target RNA sequence that is at least 95%, 96%, 97%, 98%, or 99% identical to an RNA sequence encoded by a DNA sequence defined by a set of genomic coordinates shown in Table 4 or Table 5 and the at least one CBLB-targeting nucleic acid molecule binds to a target RNA sequence that is at least 95%, 96%, 97%, 98%, or 99% identical to an RNA sequence encoded by a DNA sequence defined by a set of genomic coordinates shown in Table 17 or Table 18. In some embodiments, the at least one SOCS1-targeting nucleic acid molecule binds to a target RNA sequence that is 100% identical to an RNA sequence encoded by a DNA sequence defined by a set of genomic coordinates shown in Table 4 or Table 5 and the at least one CBLB-targeting nucleic acid molecule binds to a target RNA sequence that is 100% identical to an RNA sequence encoded by a DNA sequence defined by a set of genomic coordinates shown in Table 17 or Table 18.

[0431] In some embodiments, the at least one SOCS1-targeting nucleic acid molecule binds to a target RNA sequence that is at least 95%, 96%, 97%, 98%, or 99% identical to an RNA sequence encoded by one of SEQ ID NOs: 23-200 or 23-55 and the at least one CBLB-targeting nucleic acid molecule binds to a target RNA sequence that is at least 95%, 96%, 97%, 98%, or 99% identical to an RNA sequence encoded by one of SEQ ID NOs: 798-823. In some embodiments, the at least one SOCS1-targeting nucleic acid molecule binds to a target RNA sequence that is 100% identical to an RNA sequence encoded by one of SEQ ID NOs: 23-200 or 23-55 and the at least one CBLB-targeting nucleic acid molecule binds to a target RNA sequence that is 100% identical to an RNA sequence encoded by one of SEQ ID NOs: 798-823.

[0432] In some embodiments, the nucleic acid-based gene-regulating system comprises at least two siRNA or shRNA molecules, wherein at least one siRNA or shRNA molecule is a SOCS1-targeting siRNA or shRNA molecule and at least one siRNA or shRNA molecule is a CBLB-targeting siRNA or shRNA molecule. In some embodiments, the at least one SOCS1-targeting nucleic acid molecule is an siRNA or an shRNA molecule and at least one CBLB-targeting nucleic acid molecule is an siRNA or shRNA molecule. In some embodiments, the at least one SOCS1-targeting siRNA or an shRNA molecule binds to a target RNA sequence that is at least 95%, 96%, 97%, 98%, or 99% identical to an RNA sequence encoded by the SOCS1 gene (SEQ ID NO: 1) or the Socs1 gene (SEQ ID NO: 2) and the at least one CBLB-targeting siRNA or shRNA molecule binds to a target RNA sequence that is at least 95%, 96%, 97%, 98%, or 99% identical to an RNA sequence encoded by the CBLB gene (SEQ ID NO: 7) or the Cblb gene (SEQ ID NO: 8). In some embodiments, the at least one SOCS1-targeting siRNA or an shRNA molecule binds to a target RNA sequence that is 100% identical to an RNA sequence encoded by the SOCS1 gene (SEQ ID NO: 1) or the Socs1 gene (SEQ ID NO: 2) and the at least one CBLB-targeting siRNA or shRNA molecule binds to a target RNA sequence that is 100% identical to an RNA sequence encoded by the CBLB gene (SEQ ID NO: 7) or the Cblb gene (SEQ ID NO: 8).

[0433] In some embodiments, the at least one SOCS1-targeting siRNA or shRNA molecule binds to a target RNA sequence that is at least 95%, 96%, 97%, 98%, or 99% identical to an RNA sequence encoded by a DNA sequence defined by a set of genomic coordinates shown in Table 4 or Table 5 and the at least one CBLB-targeting siRNA or shRNA molecule binds to a target RNA sequence that is at least 95%, 96%, 97%, 98%, or 99% identical to an RNA sequence encoded by a DNA sequence defined by a set of genomic coordinates shown in Table 17 or Table 18. In some embodiments, the at least one SOCS1-targeting siRNA or shRNA molecule binds to a target RNA sequence that is 100% identical to an RNA sequence encoded by a DNA sequence defined by a set of genomic coordinates shown in Table 4 or Table 5 and the at least one CBLB-targeting siRNA or shRNA molecule binds to a target RNA sequence that is 100% identical to an RNA sequence encoded by a DNA sequence defined by a set of genomic coordinates shown in Table 17 or Table 18.

[0434] In some embodiments, the at least one SOCS1-targeting siRNA or shRNA molecule binds to a target RNA sequence that is at least 95%, 96%, 97%, 98%, or 99% identical to an RNA sequence encoded by one of SEQ ID NOs: 23-200 or 23-55 and the at least one CBLB-targeting siRNA or shRNA molecule binds to a target RNA sequence that is at least 95%, 96%, 97%, 98%, or 99% identical to an RNA sequence encoded by one of SEQ ID NOs: 798-823. In some embodiments, the at least one SOCS1-targeting siRNA or shRNA molecule binds to a target RNA sequence that is 100% identical to an RNA sequence encoded by one of SEQ ID NOs: 23-200 or 23-55 and the at least one CBLB-targeting siRNA or shRNA molecule binds to a target RNA sequence that is 100% identical to an RNA sequence encoded by one of SEQ ID NOs: 798-823.

[0435] In some embodiments, the nucleic acid-based gene-regulating system comprises at least two nucleic acid molecules (e.g., an siRNA, an shRNA, an RNA aptamer, or a morpholino), wherein at least one nucleic acid molecule is a RC3H1-targeting nucleic acid molecule and at least one nucleic acid molecule is a PTPN2-targeting nucleic acid molecule. In some embodiments, the at least one RC3H1-targeting nucleic acid molecule binds to a target RNA sequence that is at least 95%, 96%, 97%, 98%, or 99% identical to an RNA sequence encoded by the RC3H1 gene (SEQ ID NO: 9) or the Rc3h1 gene (SEQ ID NO: 10) and the at least one PTPN2-targeting nucleic acid molecule binds to a target RNA sequence that is at least 95%, 96%, 97%, 98%, or 99% identical to an RNA sequence encoded by the PTPN2 gene (SEQ ID NO: 3) or the Ptpn2 gene (SEQ ID NO: 4). In some embodiments, the at least one RC3H1-targeting nucleic acid molecule binds to a target RNA sequence that is 100% identical to an RNA sequence encoded by the RC3H1 gene (SEQ ID NO: 9) or the Rc3h1 gene (SEQ ID NO: 10) and the at least one PTPN2-targeting nucleic acid molecule binds to a target RNA sequence that is 100% identical to an RNA sequence encoded by the PTPN2 gene (SEQ ID NO: 3) or the Ptpn2 gene (SEQ ID NO: 4).

[0436] In some embodiments, the at least one RC3H1-targeting nucleic acid molecule binds to a target RNA sequence that is at least 95%, 96%, 97%, 98%, or 99% identical to an RNA sequence encoded by a DNA sequence defined by a set of genomic coordinates shown in Table 19 or Table 20 and the at least one PTPN2-targeting nucleic acid molecule binds to a target RNA sequence that is at least 95%, 96%, 97%, 98%, or 99% identical to an RNA sequence encoded by a DNA sequence defined by a set of genomic coordinates shown in Table 9 or Table 10. In some embodiments, the at least one RC3H1-targeting nucleic acid molecule binds to a target RNA sequence that is 100% identical to an RNA sequence encoded by a DNA sequence defined by a set of genomic coordinates shown in Table 19 or Table 20 and the at least one PTPN2-targeting nucleic acid molecule binds to a target RNA sequence that is 100% identical to an RNA sequence encoded by a DNA sequence defined by a set of genomic coordinates shown in Table 9 or Table 10.

[0437] In some embodiments, the at least one RC3H1-targeting nucleic acid molecule binds to a target RNA sequence that is at least 95%, 96%, 97%, 98%, or 99% identical to an RNA sequence encoded by one of SEQ ID NOs: 824-844 and the at least one PTPN2-targeting nucleic acid molecule binds to a target RNA sequence that is at least 95%, 96%, 97%, 98%, or 99% identical to an RNA sequence encoded by one of SEQ ID NOs: 201-327. In some embodiments, the at least one RC3H1-targeting nucleic acid molecule binds to a target RNA sequence that is 100% identical to an RNA sequence encoded by one of SEQ ID NOs: 824-844 and the at least one PTPN2-targeting nucleic acid molecule binds to a target RNA sequence that is 100% identical to an RNA sequence encoded by one of SEQ ID NOs: 201-327.

[0438] In some embodiments, the nucleic acid-based gene-regulating system comprises at least two siRNA or shRNA molecules, wherein at least one siRNA or shRNA molecule is a RC3H1-targeting siRNA or shRNA molecule and at least one siRNA or shRNA molecule is a PTPN2-targeting siRNA or shRNA molecule. In some embodiments, the at least one RC3H1-targeting nucleic acid molecule is an siRNA or an shRNA molecule and at least one PTPN2-targeting nucleic acid molecule is an siRNA or shRNA molecule. In some embodiments, the at least one RC3H1-targeting siRNA or an shRNA molecule binds to a target RNA sequence that is at least 95%, 96%, 97%, 98%, or 99% identical to an RNA sequence encoded by the RC3H1 gene (SEQ ID NO: 9) or the Rc3h1 gene (SEQ ID NO: 10) and the at least one PTPN2-targeting siRNA or shRNA molecule binds to a target RNA sequence that is at least 95%, 96%, 97%, 98%, or 99% identical to an RNA sequence encoded by the PTPN2 gene (SEQ ID NO: 3) or the Ptpn2 gene (SEQ ID NO: 4). In some embodiments, the at least one RC3H1-targeting siRNA or an shRNA molecule binds to a target RNA sequence that is 100% identical to an RNA sequence encoded by the RC3H1 gene (SEQ ID NO: 9) or the Rc3h1 gene (SEQ ID NO: 10) and the at least one PTPN2-targeting siRNA or shRNA molecule binds to a target RNA sequence that is 100% identical to an RNA sequence encoded by the PTPN2 gene (SEQ ID NO: 3) or the Ptpn2 gene (SEQ ID NO: 4).

[0439] In some embodiments, the at least one RC3H1-targeting siRNA or shRNA molecule binds to a target RNA sequence that is at least 95%, 96%, 97%, 98%, or 99% identical to an RNA sequence encoded by a DNA sequence defined by a set of genomic coordinates shown in Table 19 or Table 20 and the at least one PTPN2-targeting siRNA or shRNA molecule binds to a target RNA sequence that is at least 95%, 96%, 97%, 98%, or 99% identical to an RNA sequence encoded by a DNA sequence defined by a set of genomic coordinates shown in Table 9 or Table 10. In some embodiments, the at least one RC3H1-targeting siRNA or shRNA molecule binds to a target RNA sequence that is 100% identical to an RNA sequence encoded by a DNA sequence defined by a set of genomic coordinates shown in Table 19 or Table 20 and the at least one PTPN2-targeting siRNA or shRNA molecule binds to a target RNA sequence that is 100% identical to an RNA sequence encoded by a DNA sequence defined by a set of genomic coordinates shown in Table 9 or Table 10.

[0440] In some embodiments, the at least one RC3H1-targeting siRNA or shRNA molecule binds to a target RNA sequence that is at least 95%, 96%, 97%, 98%, or 99% identical to an RNA sequence encoded by one of SEQ ID NOs: 824-844 and the at least one PTPN2-targeting siRNA or shRNA molecule binds to a target RNA sequence that is at least 95%, 96%, 97%, 98%, or 99% identical to an RNA sequence encoded by one of SEQ ID NOs: 201-327. In some embodiments, the at least one RC3H1-targeting siRNA or shRNA molecule binds to a target RNA sequence that is 100% identical to an RNA sequence encoded by one of SEQ ID NOs: 824-844 and the at least one PTPN2-targeting siRNA or shRNA molecule binds to a target RNA sequence that is 100% identical to an RNA sequence encoded by one of SEQ ID NOs: 201-327.

[0441] In some embodiments, the nucleic acid-based gene-regulating system comprises at least two nucleic acid molecules (e.g., an siRNA, an shRNA, an RNA aptamer, or a morpholino), wherein at least one nucleic acid molecule is a RC3H1-targeting nucleic acid molecule and at least one nucleic acid molecule is a ZC3H12A-targeting nucleic acid molecule. In some embodiments, the at least one RC3H1-targeting nucleic acid molecule binds to a target RNA sequence that is at least 95%, 96%, 97%, 98%, or 99% identical to an RNA sequence encoded by the RC3H1 gene (SEQ ID NO: 9) or the Rc3h1 gene (SEQ ID NO: 10) and the at least one ZC3H12A-targeting nucleic acid molecule binds to a target RNA sequence that is at least 95%, 96%, 97%, 98%, or 99% identical to an RNA sequence encoded by the ZC3H12A gene (SEQ ID NO: 5) or the Zc3h12a gene (SEQ ID NO: 6). In some embodiments, the at least one RC3H1-targeting nucleic acid molecule binds to a target RNA sequence that is 100% identical to an RNA sequence encoded by the RC3H1 gene (SEQ ID NO: 9) or the Rc3h1 gene (SEQ ID NO: 10) and the at least one ZC3H12A-targeting nucleic acid molecule binds to a target RNA sequence that is 100% identical to an RNA sequence encoded by the ZC3H12A gene (SEQ ID NO: 5) or the Zc3h12a gene (SEQ ID NO: 6).

[0442] In some embodiments, the at least one RC3H1-targeting nucleic acid molecule binds to a target RNA sequence that is at least 95%, 96%, 97%, 98%, or 99% identical to an RNA sequence encoded by a DNA sequence defined by a set of genomic coordinates shown in Table 19 or Table 20 and the at least one ZC3H12A-targeting nucleic acid molecule binds to a target RNA sequence that is at least 95%, 96%, 97%, 98%, or 99% identical to an RNA sequence encoded by a DNA sequence defined by a set of genomic coordinates shown in Table 11 or Table 12. In some embodiments, the at least one RC3H1-targeting nucleic acid molecule binds to a target RNA sequence that is 100% identical to an RNA sequence encoded by a DNA sequence defined by a set of genomic coordinates shown in Table 19 or Table 20 and the at least one ZC3H12A-targeting nucleic acid molecule binds to a target RNA sequence that is 100% identical to an RNA sequence encoded by a DNA sequence defined by a set of genomic coordinates shown in Table 11 or Table 12.

[0443] In some embodiments, the at least one RC3H1-targeting nucleic acid molecule binds to a target RNA sequence that is at least 95%, 96%, 97%, 98%, or 99% identical to an RNA sequence encoded by one of SEQ ID NOs: 824-844 and the at least one ZC3H12A-targeting nucleic acid molecule binds to a target RNA sequence that is at least 95%, 96%, 97%, 98%, or 99% identical to an RNA sequence encoded by one of SEQ ID NOs: 331-797 or 331-337. In some embodiments, the at least one RC3H1-targeting nucleic acid molecule binds to a target RNA sequence that is 100% identical to an RNA sequence encoded by one of SEQ ID NOs: 824-844 and the at least one ZC3H12A-targeting nucleic acid molecule binds to a target RNA sequence that is 100% identical to an RNA sequence encoded by one of SEQ ID NOs: 331-797 or 331-337.

[0444] In some embodiments, the nucleic acid-based gene-regulating system comprises at least two siRNA or shRNA molecules, wherein at least one siRNA or shRNA molecule is a RC3H1-targeting siRNA or shRNA molecule and at least one siRNA or shRNA molecule is a ZC3H12A-targeting siRNA or shRNA molecule. In some embodiments, the at least one RC3H1-targeting nucleic acid molecule is an siRNA or an shRNA molecule and at least one ZC3H12A-targeting nucleic acid molecule is an siRNA or shRNA molecule. In some embodiments, the at least one RC3H1-targeting siRNA or an shRNA molecule binds to a target RNA sequence that is at least 95%, 96%, 97%, 98%, or 99% identical to an RNA sequence encoded by the RC3H1 gene (SEQ ID NO: 9) or the Rc3h1 gene (SEQ ID NO: 10) and the at least one ZC3H12A-targeting siRNA or shRNA molecule binds to a target RNA sequence that is at least 95%, 96%, 97%, 98%, or 99% identical to an RNA sequence encoded by the ZC3H12A gene (SEQ ID NO: 5) or the Zc3h12a gene (SEQ ID NO: 6). In some embodiments, the at least one RC3H1-targeting siRNA or an shRNA molecule binds to a target RNA sequence that is 100% identical to an RNA sequence encoded by the RC3H1 gene (SEQ ID NO: 9) or the Rc3h1 gene (SEQ ID NO: 10) and the at least one ZC3H12A-targeting siRNA or shRNA molecule binds to a target RNA sequence that is 100% identical to an RNA sequence encoded by the ZC3H12A gene (SEQ ID NO: 5) or the Zc3h12a gene (SEQ ID NO: 6).

[0445] In some embodiments, the at least one RC3H1-targeting siRNA or shRNA molecule binds to a target RNA sequence that is at least 95%, 96%, 97%, 98%, or 99% identical to an RNA sequence encoded by a DNA sequence defined by a set of genomic coordinates shown in Table 19 or Table 20 and the at least one ZC3H12A-targeting siRNA or shRNA molecule binds to a target RNA sequence that is at least 95%, 96%, 97%, 98%, or 99% identical to an RNA sequence encoded by a DNA sequence defined by a set of genomic coordinates shown in Table 11 or Table 12. In some embodiments, the at least one RC3H1-targeting siRNA or shRNA molecule binds to a target RNA sequence that is 100% identical to an RNA sequence encoded by a DNA sequence defined by a set of genomic coordinates shown in Table 19 or Table 20 and the at least one ZC3H12A-targeting siRNA or shRNA molecule binds to a target RNA sequence that is 100% identical to an RNA sequence encoded by a DNA sequence defined by a set of genomic coordinates shown in Table 11 or Table 12.

[0446] In some embodiments, the at least one RC3H1-targeting siRNA or shRNA molecule binds to a target RNA sequence that is at least 95%, 96%, 97%, 98%, or 99% identical to an RNA sequence encoded by one of SEQ ID NOs: 824-844 and the at least one ZC3H12A-targeting siRNA or shRNA molecule binds to a target RNA sequence that is at least 95%, 96%, 97%, 98%, or 99% identical to an RNA sequence encoded by one of SEQ ID NOs: 331-797 or 331-337. In some embodiments, the at least one RC3H1-targeting siRNA or shRNA molecule binds to a target RNA sequence that is 100% identical to an RNA sequence encoded by one of SEQ ID NOs: 824-844 and the at least one ZC3H12A-targeting siRNA or shRNA molecule binds to a target RNA sequence that is 100% identical to an RNA sequence encoded by one of SEQ ID NOs: 331-797 or 331-337.

[0447] In some embodiments, the nucleic acid-based gene-regulating system comprises at least two nucleic acid molecules (e.g., an siRNA, an shRNA, an RNA aptamer, or a morpholino), wherein at least one nucleic acid molecule is a SOCS1-targeting nucleic acid molecule and at least one nucleic acid molecule is a RC3H1-targeting nucleic acid molecule. In some embodiments, the at least one SOCS1-targeting nucleic acid molecule binds to a target RNA sequence that is at least 95%, 96%, 97%, 98%, or 99% identical to an RNA sequence encoded by the SOCS1 gene (SEQ ID NO: 1) or the Socs1 gene (SEQ ID NO: 2) and the at least one RC3H1-targeting nucleic acid molecule binds to a target RNA sequence that is at least 95%, 96%, 97%, 98%, or 99% identical to an RNA sequence encoded by the RC3H1 gene (SEQ ID NO: 9) or the Rc3h1 gene (SEQ ID NO: 10). In some embodiments, the at least one SOCS1-targeting nucleic acid molecule binds to a target RNA sequence that is 100% identical to an RNA sequence encoded by the SOCS1 gene (SEQ ID NO: 1) or the Socs1 gene (SEQ ID NO: 2) and the at least one RC3H1-targeting nucleic acid molecule binds to a target RNA sequence that is 100% identical to an RNA sequence encoded by the RC3H1 gene (SEQ ID NO: 9) or the Rc3h1 gene (SEQ ID NO: 10).

[0448] In some embodiments, the at least one SOCS1-targeting nucleic acid molecule binds to a target RNA sequence that is at least 95%, 96%, 97%, 98%, or 99% identical to an RNA sequence encoded by a DNA sequence defined by a set of genomic coordinates shown in Table 4 or Table 5 and the at least one RC3H1-targeting nucleic acid molecule binds to a target RNA sequence that is at least 95%, 96%, 97%, 98%, or 99% identical to an RNA sequence encoded by a DNA sequence defined by a set of genomic coordinates shown in Table 19 or Table 20. In some embodiments, the at least one SOCS1-targeting nucleic acid molecule binds to a target RNA sequence that is 100% identical to an RNA sequence encoded by a DNA sequence defined by a set of genomic coordinates shown in Table 4 or Table 5 and the at least one RC3H1-targeting nucleic acid molecule binds to a target RNA sequence that is 100% identical to an RNA sequence encoded by a DNA sequence defined by a set of genomic coordinates shown in Table 19 or Table 20.

[0449] In some embodiments, the at least one SOCS1-targeting nucleic acid molecule binds to a target RNA sequence that is at least 95%, 96%, 97%, 98%, or 99% identical to an RNA sequence encoded by one of SEQ ID NOs: 23-200 or 23-55 and the at least one RC3H1-targeting nucleic acid molecule binds to a target RNA sequence that is at least 95%, 96%, 97%, 98%, or 99% identical to an RNA sequence encoded by one of SEQ ID NOs: 824-844. In some embodiments, the at least one SOCS1-targeting nucleic acid molecule binds to a target RNA sequence that is 100% identical to an RNA sequence encoded by one of SEQ ID NOs: 23-200 or 23-55 and the at least one RC3H1-targeting nucleic acid molecule binds to a target RNA sequence that is 100% identical to an RNA sequence encoded by one of SEQ ID NOs: 824-844.

[0450] In some embodiments, the nucleic acid-based gene-regulating system comprises at least two siRNA or shRNA molecules, wherein at least one siRNA or shRNA molecule is a SOCS1-targeting siRNA or shRNA molecule and at least one siRNA or shRNA molecule is a RC3H1-targeting siRNA or shRNA molecule. In some embodiments, the at least one SOCS1-targeting nucleic acid molecule is an siRNA or an shRNA molecule and at least one RC3H1-targeting nucleic acid molecule is an siRNA or shRNA molecule. In some embodiments, the at least one SOCS1-targeting siRNA or an shRNA molecule binds to a target RNA sequence that is at least 95%, 96%, 97%, 98%, or 99% identical to an RNA sequence encoded by the SOCS1 gene (SEQ ID NO: 1) or the Socs1 gene (SEQ ID NO: 2) and the at least one RC3H1-targeting siRNA or shRNA molecule binds to a target RNA sequence that is at least 95%, 96%, 97%, 98%, or 99% identical to an RNA sequence encoded by the RC3H1 gene (SEQ ID NO: 9) or the Rc3h1 gene (SEQ ID NO: 10). In some embodiments, the at least one SOCS1-targeting siRNA or an shRNA molecule binds to a target RNA sequence that is 100% identical to an RNA sequence encoded by the SOCS1 gene (SEQ ID NO: 1) or the Socs1 gene (SEQ ID NO: 2) and the at least one RC3H1-targeting siRNA or shRNA molecule binds to a target RNA sequence that is 100% identical to an RNA sequence encoded by the RC3H1 gene (SEQ ID NO: 9) or the Rc3h1 gene (SEQ ID NO: 10).

[0451] In some embodiments, the at least one SOCS1-targeting siRNA or shRNA molecule binds to a target RNA sequence that is at least 95%, 96%, 97%, 98%, or 99% identical to an RNA sequence encoded by a DNA sequence defined by a set of genomic coordinates shown in Table 4 or Table 5 and the at least one RC3H1-targeting siRNA or shRNA molecule binds to a target RNA sequence that is at least 95%, 96%, 97%, 98%, or 99% identical to an RNA sequence encoded by a DNA sequence defined by a set of genomic coordinates shown in Table 19 or Table 20. In some embodiments, the at least one SOCS1-targeting siRNA or shRNA molecule binds to a target RNA sequence that is 100% identical to an RNA sequence encoded by a DNA sequence defined by a set of genomic coordinates shown in Table 4 or Table 5 and the at least one RC3H1-targeting siRNA or shRNA molecule binds to a target RNA sequence that is 100% identical to an RNA sequence encoded by a DNA sequence defined by a set of genomic coordinates shown in Table 19 or Table 20.

[0452] In some embodiments, the at least one SOCS1-targeting siRNA or shRNA molecule binds to a target RNA sequence that is at least 95%, 96%, 97%, 98%, or 99% identical to an RNA sequence encoded by one of SEQ ID NOs: 23-200 or 23-55 and the at least one RC3H1-targeting siRNA or shRNA molecule binds to a target RNA sequence that is at least 95%, 96%, 97%, 98%, or 99% identical to an RNA sequence encoded by one of SEQ ID NOs: 824-844. In some embodiments, the at least one SOCS1-targeting siRNA or shRNA molecule binds to a target RNA sequence that is 100% identical to an RNA sequence encoded by one of SEQ ID NOs: 23-200 or 23-55 and the at least one RC3H1-targeting siRNA or shRNA molecule binds to a target RNA sequence that is 100% identical to an RNA sequence encoded by one of SEQ ID NOs: 824-844.

[0453] In some embodiments, the nucleic acid-based gene-regulating system comprises at least two nucleic acid molecules (e.g., an siRNA, an shRNA, an RNA aptamer, or a morpholino), wherein at least one nucleic acid molecule is a CBLB-targeting nucleic acid molecule and at least one nucleic acid molecule is a RC3H1-targeting nucleic acid molecule. In some embodiments, the at least one CBLB-targeting nucleic acid molecule binds to a target RNA sequence that is at least 95%, 96%, 97%, 98%, or 99% identical to an RNA sequence encoded by the CBLB gene (SEQ ID NO: 7) or the Cblb gene (SEQ ID NO: 8) and the at least one RC3H1-targeting nucleic acid molecule binds to a target RNA sequence that is at least 95%, 96%, 97%, 98%, or 99% identical to an RNA sequence encoded by the RC3H1 gene (SEQ ID NO: 9) or the Rc3h1 gene (SEQ ID NO: 10). In some embodiments, the at least one CBLB-targeting nucleic acid molecule binds to a target RNA sequence that is 100% identical to an RNA sequence encoded by the CBLB gene (SEQ ID NO: 7) or the Cblb gene (SEQ ID NO: 8) and the at least one RC3H1-targeting nucleic acid molecule binds to a target RNA sequence that is 100% identical to an RNA sequence encoded by the RC3H1 gene (SEQ ID NO: 9) or the Rc3h1 gene (SEQ ID NO: 10).

[0454] In some embodiments, the at least one CBLB-targeting nucleic acid molecule binds to a target RNA sequence that is at least 95%, 96%, 97%, 98%, or 99% identical to an RNA sequence encoded by a DNA sequence defined by a set of genomic coordinates shown in Table 17 or Table 18 and the at least one RC3H1-targeting nucleic acid molecule binds to a target RNA sequence that is at least 95%, 96%, 97%, 98%, or 99% identical to an RNA sequence encoded by a DNA sequence defined by a set of genomic coordinates shown in Table 19 or Table 20. In some embodiments, the at least one CBLB-targeting nucleic acid molecule binds to a target RNA sequence that is 100% identical to an RNA sequence encoded by a DNA sequence defined by a set of genomic coordinates shown in Table 17 or Table 18 and the at least one RC3H1-targeting nucleic acid molecule binds to a target RNA sequence that is 100% identical to an RNA sequence encoded by a DNA sequence defined by a set of genomic coordinates shown in Table 19 or Table 20.

[0455] In some embodiments, the at least one CBLB-targeting nucleic acid molecule binds to a target RNA sequence that is at least 95%, 96%, 97%, 98%, or 99% identical to an RNA sequence encoded by one of SEQ ID NOs: 798-823 and the at least one RC3H1-targeting nucleic acid molecule binds to a target RNA sequence that is at least 95%, 96%, 97%, 98%, or 99% identical to an RNA sequence encoded by one of SEQ ID NOs: 824-844. In some embodiments, the at least one CBLB-targeting nucleic acid molecule binds to a target RNA sequence that is 100% identical to an RNA sequence encoded by one of SEQ ID NOs: 798-823 and the at least one RC3H1-targeting nucleic acid molecule binds to a target RNA sequence that is 100% identical to an RNA sequence encoded by one of SEQ ID NOs: 824-844.

[0456] In some embodiments, the nucleic acid-based gene-regulating system comprises at least two siRNA or shRNA molecules, wherein at least one siRNA or shRNA molecule is a CBLB-targeting siRNA or shRNA molecule and at least one siRNA or shRNA molecule is a RC3H1-targeting siRNA or shRNA molecule. In some embodiments, the at least one CBLB-targeting nucleic acid molecule is an siRNA or an shRNA molecule and at least one RC3H1-targeting nucleic acid molecule is an siRNA or shRNA molecule. In some embodiments, the at least one CBLB-targeting siRNA or an shRNA molecule binds to a target RNA sequence that is at least 95%, 96%, 97%, 98%, or 99% identical to an RNA sequence encoded by the CBLB gene (SEQ ID NO: 7) or the Cblb gene (SEQ ID NO: 8) and the at least one RC3H1-targeting siRNA or shRNA molecule binds to a target RNA sequence that is at least 95%, 96%, 97%, 98%, or 99% identical to an RNA sequence encoded by the RC3H1 gene (SEQ ID NO: 9) or the Rc3h1 gene (SEQ ID NO: 10). In some embodiments, the at least one CBLB-targeting siRNA or an shRNA molecule binds to a target RNA sequence that is 100% identical to an RNA sequence encoded by the CBLB gene (SEQ ID NO: 7) or the Cblb gene (SEQ ID NO: 8) and the at least one RC3H1-targeting siRNA or shRNA molecule binds to a target RNA sequence that is 100% identical to an RNA sequence encoded by the RC3H1 gene (SEQ ID NO: 9) or the Rc3h1 gene (SEQ ID NO: 10).

[0457] In some embodiments, the at least one CBLB-targeting siRNA or shRNA molecule binds to a target RNA sequence that is at least 95%, 96%, 97%, 98%, or 99% identical to an RNA sequence encoded by a DNA sequence defined by a set of genomic coordinates shown in Table 17 or Table 18 and the at least one RC3H1-targeting siRNA or shRNA molecule binds to a target RNA sequence that is at least 95%, 96%, 97%, 98%, or 99% identical to an RNA sequence encoded by a DNA sequence defined by a set of genomic coordinates shown in Table 19 or Table 20. In some embodiments, the at least one CBLB-targeting siRNA or shRNA molecule binds to a target RNA sequence that is 100% identical to an RNA sequence encoded by a DNA sequence defined by a set of genomic coordinates shown in Table 17 or Table 18 and the at least one RC3H1-targeting siRNA or shRNA molecule binds to a target RNA sequence that is 100% identical to an RNA sequence encoded by a DNA sequence defined by a set of genomic coordinates shown in Table 19 or Table 20.

[0458] In some embodiments, the at least one CBLB-targeting siRNA or shRNA molecule binds to a target RNA sequence that is at least 95%, 96%, 97%, 98%, or 99% identical to an RNA sequence encoded by one of SEQ ID NOs: 798-823 and the at least one RC3H1-targeting siRNA or shRNA molecule binds to a target RNA sequence that is at least 95%, 96%, 97%, 98%, or 99% identical to an RNA sequence encoded by one of SEQ ID NOs: 824-844. In some embodiments, the at least one CBLB-targeting siRNA or shRNA molecule binds to a target RNA sequence that is 100% identical to an RNA sequence encoded by one of SEQ ID NOs: 798-823 and the at least one RC3H1-targeting siRNA or shRNA molecule binds to a target RNA sequence that is 100% identical to an RNA sequence encoded by one of SEQ ID NOs: 824-844.

[0459] In some embodiments, the nucleic acid-based gene-regulating system comprises at least two nucleic acid molecules (e.g., an siRNA, an shRNA, an RNA aptamer, or a morpholino), wherein at least one nucleic acid molecule is a NFKBIA-targeting nucleic acid molecule and at least one nucleic acid molecule is a PTPN2-targeting nucleic acid molecule. In some embodiments, the at least one NFKBIA-targeting nucleic acid molecule binds to a target RNA sequence that is at least 95%, 96%, 97%, 98%, or 99% identical to an RNA sequence encoded by the NFKBIA gene (SEQ ID NO: 11) or the Nfkbia gene (SEQ ID NO: 12) and the at least one PTPN2-targeting nucleic acid molecule binds to a target RNA sequence that is at least 95%, 96%, 97%, 98%, or 99% identical to an RNA sequence encoded by the PTPN2 gene (SEQ ID NO: 3) or the Ptpn2 gene (SEQ ID NO: 4). In some embodiments, the at least one NFKBIA-targeting nucleic acid molecule binds to a target RNA sequence that is 100% identical to an RNA sequence encoded by the NFKBIA gene (SEQ ID NO: 11) or the Nfkbia gene (SEQ ID NO: 12) and the at least one PTPN2-targeting nucleic acid molecule binds to a target RNA sequence that is 100% identical to an RNA sequence encoded by the PTPN2 gene (SEQ ID NO: 3) or the Ptpn2 gene (SEQ ID NO: 4).

[0460] In some embodiments, the at least one NFKBIA-targeting nucleic acid molecule binds to a target RNA sequence that is at least 95%, 96%, 97%, 98%, or 99% identical to an RNA sequence encoded by a DNA sequence defined by a set of genomic coordinates shown in Table 21 or Table 22 and the at least one PTPN2-targeting nucleic acid molecule binds to a target RNA sequence that is at least 95%, 96%, 97%, 98%, or 99% identical to an RNA sequence encoded by a DNA sequence defined by a set of genomic coordinates shown in Table 9 or Table 10. In some embodiments, the at least one NFKBIA-targeting nucleic acid molecule binds to a target RNA sequence that is 100% identical to an RNA sequence encoded by a DNA sequence defined by a set of genomic coordinates shown in Table 21 or Table 22 and the at least one PTPN2-targeting nucleic acid molecule binds to a target RNA sequence that is 100% identical to an RNA sequence encoded by a DNA sequence defined by a set of genomic coordinates shown in Table 9 or Table 10.

[0461] In some embodiments, the at least one NFKBIA-targeting nucleic acid molecule binds to a target RNA sequence that is at least 95%, 96%, 97%, 98%, or 99% identical to an RNA sequence encoded by one of SEQ ID NOs: 845-875 and the at least one PTPN2-targeting nucleic acid molecule binds to a target RNA sequence that is at least 95%, 96%, 97%, 98%, or 99% identical to an RNA sequence encoded by one of SEQ ID NOs: 201-327. In some embodiments, the at least one NFKBIA-targeting nucleic acid molecule binds to a target RNA sequence that is 100% identical to an RNA sequence encoded by one of SEQ ID NOs: 845-875 and the at least one PTPN2-targeting nucleic acid molecule binds to a target RNA sequence that is 100% identical to an RNA sequence encoded by one of SEQ ID NOs: 201-327.

[0462] In some embodiments, the nucleic acid-based gene-regulating system comprises at least two siRNA or shRNA molecules, wherein at least one siRNA or shRNA molecule is a NFKBIA-targeting siRNA or shRNA molecule and at least one siRNA or shRNA molecule is a PTPN2-targeting siRNA or shRNA molecule. In some embodiments, the at least one NFKBIA-targeting nucleic acid molecule is an siRNA or an shRNA molecule and at least one PTPN2-targeting nucleic acid molecule is an siRNA or shRNA molecule. In some embodiments, the at least one NFKBIA-targeting siRNA or an shRNA molecule binds to a target RNA sequence that is at least 95%, 96%, 97%, 98%, or 99% identical to an RNA sequence encoded by the NFKBIA gene (SEQ ID NO: 11) or the Nfkbia gene (SEQ ID NO: 12) and the at least one PTPN2-targeting siRNA or shRNA molecule binds to a target RNA sequence that is at least 95%, 96%, 97%, 98%, or 99% identical to an RNA sequence encoded by the PTPN2 gene (SEQ ID NO: 3) or the Ptpn2 gene (SEQ ID NO: 4). In some embodiments, the at least one NFKBIA-targeting siRNA or an shRNA molecule binds to a target RNA sequence that is 100% identical to an RNA sequence encoded by the NFKBIA gene (SEQ ID NO: 11) or the Nfkbia gene (SEQ ID NO: 12) and the at least one PTPN2-targeting siRNA or shRNA molecule binds to a target RNA sequence that is 100% identical to an RNA sequence encoded by the PTPN2 gene (SEQ ID NO: 3) or the Ptpn2 gene (SEQ ID NO: 4).

[0463] In some embodiments, the at least one NFKBIA-targeting siRNA or shRNA molecule binds to a target RNA sequence that is at least 95%, 96%, 97%, 98%, or 99% identical to an RNA sequence encoded by a DNA sequence defined by a set of genomic coordinates shown in Table 21 or Table 22 and the at least one PTPN2-targeting siRNA or shRNA molecule binds to a target RNA sequence that is at least 95%, 96%, 97%, 98%, or 99% identical to an RNA sequence encoded by a DNA sequence defined by a set of genomic coordinates shown in Table 9 or Table 10. In some embodiments, the at least one NFKBIA-targeting siRNA or shRNA molecule binds to a target RNA sequence that is 100% identical to an RNA sequence encoded by a DNA sequence defined by a set of genomic coordinates shown in Table 21 or Table 22 and the at least one PTPN2-targeting siRNA or shRNA molecule binds to a target RNA sequence that is 100% identical to an RNA sequence encoded by a DNA sequence defined by a set of genomic coordinates shown in Table 9 or Table 10.

[0464] In some embodiments, the at least one NFKBIA-targeting siRNA or shRNA molecule binds to a target RNA sequence that is at least 95%, 96%, 97%, 98%, or 99% identical to an RNA sequence encoded by one of SEQ ID NOs: 845-875 and the at least one PTPN2-targeting siRNA or shRNA molecule binds to a target RNA sequence that is at least 95%, 96%, 97%, 98%, or 99% identical to an RNA sequence encoded by one of SEQ ID NOs: 201-327. In some embodiments, the at least one NFKBIA-targeting siRNA or shRNA molecule binds to a target RNA sequence that is 100% identical to an RNA sequence encoded by one of SEQ ID NOs: 845-875 and the at least one PTPN2-targeting siRNA or shRNA molecule binds to a target RNA sequence that is 100% identical to an RNA sequence encoded by one of SEQ ID NOs: 201-327.

[0465] In some embodiments, the nucleic acid-based gene-regulating system comprises at least two nucleic acid molecules (e.g., an siRNA, an shRNA, an RNA aptamer, or a morpholino), wherein at least one nucleic acid molecule is a NFKBIA-targeting nucleic acid molecule and at least one nucleic acid molecule is a ZC3H12A-targeting nucleic acid molecule. In some embodiments, the at least one NFKBIA-targeting nucleic acid molecule binds to a target RNA sequence that is at least 95%, 96%, 97%, 98%, or 99% identical to an RNA sequence encoded by the NFKBIA gene (SEQ ID NO: 11) or the Nfkbia gene (SEQ ID NO: 12) and the at least one ZC3H12A-targeting nucleic acid molecule binds to a target RNA sequence that is at least 95%, 96%, 97%, 98%, or 99% identical to an RNA sequence encoded by the ZC3H12A gene (SEQ ID NO: 5) or the Zc3h12a gene (SEQ ID NO: 6). In some embodiments, the at least one NFKBIA-targeting nucleic acid molecule binds to a target RNA sequence that is 100% identical to an RNA sequence encoded by the NFKBIA gene (SEQ ID NO: 11) or the Nfkbia gene (SEQ ID NO: 12) and the at least one ZC3H12A-targeting nucleic acid molecule binds to a target RNA sequence that is 100% identical to an RNA sequence encoded by the ZC3H12A gene (SEQ ID NO: 5) or the Zc3h12a gene (SEQ ID NO: 6).

[0466] In some embodiments, the at least one NFKBIA-targeting nucleic acid molecule binds to a target RNA sequence that is at least 95%, 96%, 97%, 98%, or 99% identical to an RNA sequence encoded by a DNA sequence defined by a set of genomic coordinates shown in Table 21 or Table 22 and the at least one ZC3H12A-targeting nucleic acid molecule binds to a target RNA sequence that is at least 95%, 96%, 97%, 98%, or 99% identical to an RNA sequence encoded by a DNA sequence defined by a set of genomic coordinates shown in Table 11 or Table 12. In some embodiments, the at least one NFKBIA-targeting nucleic acid molecule binds to a target RNA sequence that is 100% identical to an RNA sequence encoded by a DNA sequence defined by a set of genomic coordinates shown in Table 21 or Table 22 and the at least one ZC3H12A-targeting nucleic acid molecule binds to a target RNA sequence that is 100% identical to an RNA sequence encoded by a DNA sequence defined by a set of genomic coordinates shown in Table 11 or Table 12.

[0467] In some embodiments, the at least one NFKBIA-targeting nucleic acid molecule binds to a target RNA sequence that is at least 95%, 96%, 97%, 98%, or 99% identical to an RNA sequence encoded by one of SEQ ID NOs: 845-875 and the at least one ZC3H12A-targeting nucleic acid molecule binds to a target RNA sequence that is at least 95%, 96%, 97%, 98%, or 99% identical to an RNA sequence encoded by one of SEQ ID NOs: 331-797 or 331-337. In some embodiments, the at least one NFKBIA-targeting nucleic acid molecule binds to a target RNA sequence that is 100% identical to an RNA sequence encoded by one of SEQ ID NOs: 845-875 and the at least one ZC3H12A-targeting nucleic acid molecule binds to a target RNA sequence that is 100% identical to an RNA sequence encoded by one of SEQ ID NOs: 331-797 or 331-337.

[0468] In some embodiments, the nucleic acid-based gene-regulating system comprises at least two siRNA or shRNA molecules, wherein at least one siRNA or shRNA molecule is a NFKBIA-targeting siRNA or shRNA molecule and at least one siRNA or shRNA molecule is a ZC3H12A-targeting siRNA or shRNA molecule. In some embodiments, the at least one NFKBIA-targeting nucleic acid molecule is an siRNA or an shRNA molecule and at least one ZC3H12A-targeting nucleic acid molecule is an siRNA or shRNA molecule. In some embodiments, the at least one NFKBIA-targeting siRNA or an shRNA molecule binds to a target RNA sequence that is at least 95%, 96%, 97%, 98%, or 99% identical to an RNA sequence encoded by the NFKBIA gene (SEQ ID NO: 11) or the Nfkbia gene (SEQ ID NO: 12) and the at least one ZC3H12A-targeting siRNA or shRNA molecule binds to a target RNA sequence that is at least 95%, 96%, 97%, 98%, or 99% identical to an RNA sequence encoded by the ZC3H12A gene (SEQ ID NO: 5) or the Zc3h12a gene (SEQ ID NO: 6). In some embodiments, the at least one NFKBIA-targeting siRNA or an shRNA molecule binds to a target RNA sequence that is 100% identical to an RNA sequence encoded by the NFKBIA gene (SEQ ID NO: 11) or the Nfkbia gene (SEQ ID NO: 12) and the at least one ZC3H12A-targeting siRNA or shRNA molecule binds to a target RNA sequence that is 100% identical to an RNA sequence encoded by the ZC3H12A gene (SEQ ID NO: 5) or the Zc3h12a gene (SEQ ID NO: 6).

[0469] In some embodiments, the at least one NFKBIA-targeting siRNA or shRNA molecule binds to a target RNA sequence that is at least 95%, 96%, 97%, 98%, or 99% identical to an RNA sequence encoded by a DNA sequence defined by a set of genomic coordinates shown in Table 21 or Table 22 and the at least one ZC3H12A-targeting siRNA or shRNA molecule binds to a target RNA sequence that is at least 95%, 96%, 97%, 98%, or 99% identical to an RNA sequence encoded by a DNA sequence defined by a set of genomic coordinates shown in Table 11 or Table 12. In some embodiments, the at least one NFKBIA-targeting siRNA or shRNA molecule binds to a target RNA sequence that is 100% identical to an RNA sequence encoded by a DNA sequence defined by a set of genomic coordinates shown in Table 21 or Table 22 and the at least one ZC3H12A-targeting siRNA or shRNA molecule binds to a target RNA sequence that is 100% identical to an RNA sequence encoded by a DNA sequence defined by a set of genomic coordinates shown in Table 11 or Table 12.

[0470] In some embodiments, the at least one NFKBIA-targeting siRNA or shRNA molecule binds to a target RNA sequence that is at least 95%, 96%, 97%, 98%, or 99% identical to an RNA sequence encoded by one of SEQ ID NOs: 845-875 and the at least one ZC3H12A-targeting siRNA or shRNA molecule binds to a target RNA sequence that is at least 95%, 96%, 97%, 98%, or 99% identical to an RNA sequence encoded by one of SEQ ID NOs: 331-797 or 331-337. In some embodiments, the at least one NFKBIA-targeting siRNA or shRNA molecule binds to a target RNA sequence that is 100% identical to an RNA sequence encoded by one of SEQ ID NOs: 845-875 and the at least one ZC3H12A-targeting siRNA or shRNA molecule binds to a target RNA sequence that is 100% identical to an RNA sequence encoded by one of SEQ ID NOs: 331-797 or 331-337.

[0471] In some embodiments, the nucleic acid-based gene-regulating system comprises at least two nucleic acid molecules (e.g., an siRNA, an shRNA, an RNA aptamer, or a morpholino), wherein at least one nucleic acid molecule is a SOCS1-targeting nucleic acid molecule and at least one nucleic acid molecule is a NFKBIA-targeting nucleic acid molecule. In some embodiments, the at least one SOCS1-targeting nucleic acid molecule binds to a target RNA sequence that is at least 95%, 96%, 97%, 98%, or 99% identical to an RNA sequence encoded by the SOCS1 gene (SEQ ID NO: 1) or the Socs1 gene (SEQ ID NO: 2) and the at least one NFKBIA-targeting nucleic acid molecule binds to a target RNA sequence that is at least 95%, 96%, 97%, 98%, or 99% identical to an RNA sequence encoded by the NFKBIA gene (SEQ ID NO: 11) or the Nfkbia gene (SEQ ID NO: 12). In some embodiments, the at least one SOCS1-targeting nucleic acid molecule binds to a target RNA sequence that is 100% identical to an RNA sequence encoded by the SOCS1 gene (SEQ ID NO: 1) or the Socs1 gene (SEQ ID NO: 2) and the at least one NFKBIA-targeting nucleic acid molecule binds to a target RNA sequence that is 100% identical to an RNA sequence encoded by the NFKBIA gene (SEQ ID NO: 11) or the Nfkbia gene (SEQ ID NO: 12).

[0472] In some embodiments, the at least one SOCS1-targeting nucleic acid molecule binds to a target RNA sequence that is at least 95%, 96%, 97%, 98%, or 99% identical to an RNA sequence encoded by a DNA sequence defined by a set of genomic coordinates shown in Table 4 or Table 5 and the at least one NFKBIA-targeting nucleic acid molecule binds to a target RNA sequence that is at least 95%, 96%, 97%, 98%, or 99% identical to an RNA sequence encoded by a DNA sequence defined by a set of genomic coordinates shown in Table 21 or Table 22. In some embodiments, the at least one SOCS1-targeting nucleic acid molecule binds to a target RNA sequence that is 100% identical to an RNA sequence encoded by a DNA sequence defined by a set of genomic coordinates shown in Table 4 or Table 5 and the at least one NFKBIA-targeting nucleic acid molecule binds to a target RNA sequence that is 100% identical to an RNA sequence encoded by a DNA sequence defined by a set of genomic coordinates shown in Table 21 or Table 22.

[0473] In some embodiments, the at least one SOCS1-targeting nucleic acid molecule binds to a target RNA sequence that is at least 95%, 96%, 97%, 98%, or 99% identical to an RNA sequence encoded by one of SEQ ID NOs: 23-200 or 23-55 and the at least one NFKBIA-targeting nucleic acid molecule binds to a target RNA sequence that is at least 95%, 96%, 97%, 98%, or 99% identical to an RNA sequence encoded by one of SEQ ID NOs: 845-875. In some embodiments, the at least one SOCS1-targeting nucleic acid molecule binds to a target RNA sequence that is 100% identical to an RNA sequence encoded by one of SEQ ID NOs: 23-200 or 23-55 and the at least one NFKBIA-targeting nucleic acid molecule binds to a target RNA sequence that is 100% identical to an RNA sequence encoded by one of SEQ ID NOs: 845-875.

[0474] In some embodiments, the nucleic acid-based gene-regulating system comprises at least two siRNA or shRNA molecules, wherein at least one siRNA or shRNA molecule is a SOCS1-targeting siRNA or shRNA molecule and at least one siRNA or shRNA molecule is a NFKBIA-targeting siRNA or shRNA molecule. In some embodiments, the at least one SOCS1-targeting nucleic acid molecule is an siRNA or an shRNA molecule and at least one NFKBIA-targeting nucleic acid molecule is an siRNA or shRNA molecule. In some embodiments, the at least one SOCS1-targeting siRNA or an shRNA molecule binds to a target RNA sequence that is at least 95%, 96%, 97%, 98%, or 99% identical to an RNA sequence encoded by the SOCS1 gene (SEQ ID NO: 1) or the Socs1 gene (SEQ ID NO: 2) and the at least one NFKBIA-targeting siRNA or shRNA molecule binds to a target RNA sequence that is at least 95%, 96%, 97%, 98%, or 99% identical to an RNA sequence encoded by the NFKBIA gene (SEQ ID NO: 11) or the Nfkbia gene (SEQ ID NO: 12). In some embodiments, the at least one SOCS1-targeting siRNA or an shRNA molecule binds to a target RNA sequence that is 100% identical to an RNA sequence encoded by the SOCS1 gene (SEQ ID NO: 1) or the Socs1 gene (SEQ ID NO: 2) and the at least one NFKBIA-targeting siRNA or shRNA molecule binds to a target RNA sequence that is 100% identical to an RNA sequence encoded by the NFKBIA gene (SEQ ID NO: 11) or the Nfkbia gene (SEQ ID NO: 12).

[0475] In some embodiments, the at least one SOCS1-targeting siRNA or shRNA molecule binds to a target RNA sequence that is at least 95%, 96%, 97%, 98%, or 99% identical to an RNA sequence encoded by a DNA sequence defined by a set of genomic coordinates shown in Table 4 or Table 5 and the at least one NFKBIA-targeting siRNA or shRNA molecule binds to a target RNA sequence that is at least 95%, 96%, 97%, 98%, or 99% identical to an RNA sequence encoded by a DNA sequence defined by a set of genomic coordinates shown in Table 21 or Table 22. In some embodiments, the at least one SOCS1-targeting siRNA or shRNA molecule binds to a target RNA sequence that is 100% identical to an RNA sequence encoded by a DNA sequence defined by a set of genomic coordinates shown in Table 4 or Table 5 and the at least one NFKBIA-targeting siRNA or shRNA molecule binds to a target RNA sequence that is 100% identical to an RNA sequence encoded by a DNA sequence defined by a set of genomic coordinates shown in Table 21 or Table 22.

[0476] In some embodiments, the at least one SOCS1-targeting siRNA or shRNA molecule binds to a target RNA sequence that is at least 95%, 96%, 97%, 98%, or 99% identical to an RNA sequence encoded by one of SEQ ID NOs: 23-200 or 23-55 and the at least one NFKBIA-targeting siRNA or shRNA molecule binds to a target RNA sequence that is at least 95%, 96%, 97%, 98%, or 99% identical to an RNA sequence encoded by one of SEQ ID NOs: 845-875. In some embodiments, the at least one SOCS1-targeting siRNA or shRNA molecule binds to a target RNA sequence that is 100% identical to an RNA sequence encoded by one of SEQ ID NOs: 23-200 or 23-55 and the at least one NFKBIA-targeting siRNA or shRNA molecule binds to a target RNA sequence that is 100% identical to an RNA sequence encoded by one of SEQ ID NOs: 845-875.

[0477] In some embodiments, the nucleic acid-based gene-regulating system comprises at least two nucleic acid molecules (e.g., an siRNA, an shRNA, an RNA aptamer, or a morpholino), wherein at least one nucleic acid molecule is a CBLB-targeting nucleic acid molecule and at least one nucleic acid molecule is a NFKBIA-targeting nucleic acid molecule. In some embodiments, the at least one CBLB-targeting nucleic acid molecule binds to a target RNA sequence that is at least 95%, 96%, 97%, 98%, or 99% identical to an RNA sequence encoded by the CBLB gene (SEQ ID NO: 7) or the Cblb gene (SEQ ID NO: 8) and the at least one NFKBIA-targeting nucleic acid molecule binds to a target RNA sequence that is at least 95%, 96%, 97%, 98%, or 99% identical to an RNA sequence encoded by the NFKBIA gene (SEQ ID NO: 11) or the Nfkbia gene (SEQ ID NO: 12). In some embodiments, the at least one CBLB-targeting nucleic acid molecule binds to a target RNA sequence that is 100% identical to an RNA sequence encoded by the CBLB gene (SEQ ID NO: 7) or the Cblb gene (SEQ ID NO: 8) and the at least one NFKBIA-targeting nucleic acid molecule binds to a target RNA sequence that is 100% identical to an RNA sequence encoded by the NFKBIA gene (SEQ ID NO: 11) or the Nfkbia gene (SEQ ID NO: 12).

[0478] In some embodiments, the at least one CBLB-targeting nucleic acid molecule binds to a target RNA sequence that is at least 95%, 96%, 97%, 98%, or 99% identical to an RNA sequence encoded by a DNA sequence defined by a set of genomic coordinates shown in Table 17 or Table 18 and the at least one NFKBIA-targeting nucleic acid molecule binds to a target RNA sequence that is at least 95%, 96%, 97%, 98%, or 99% identical to an RNA sequence encoded by a DNA sequence defined by a set of genomic coordinates shown in Table 21 or Table 22. In some embodiments, the at least one CBLB-targeting nucleic acid molecule binds to a target RNA sequence that is 100% identical to an RNA sequence encoded by a DNA sequence defined by a set of genomic coordinates shown in Table 17 or Table 18 and the at least one NFKBIA-targeting nucleic acid molecule binds to a target RNA sequence that is 100% identical to an RNA sequence encoded by a DNA sequence defined by a set of genomic coordinates shown in Table 21 or Table 22.

[0479] In some embodiments, the at least one CBLB-targeting nucleic acid molecule binds to a target RNA sequence that is at least 95%, 96%, 97%, 98%, or 99% identical to an RNA sequence encoded by one of SEQ ID NOs: 798-823 and the at least one NFKBIA-targeting nucleic acid molecule binds to a target RNA sequence that is at least 95%, 96%, 97%, 98%, or 99% identical to an RNA sequence encoded by one of SEQ ID NOs: 845-875. In some embodiments, the at least one CBLB-targeting nucleic acid molecule binds to a target RNA sequence that is 100% identical to an RNA sequence encoded by one of SEQ ID NOs: 798-823 and the at least one NFKBIA-targeting nucleic acid molecule binds to a target RNA sequence that is 100% identical to an RNA sequence encoded by one of SEQ ID NOs: 845-875.

[0480] In some embodiments, the nucleic acid-based gene-regulating system comprises at least two siRNA or shRNA molecules, wherein at least one siRNA or shRNA molecule is a CBLB-targeting siRNA or shRNA molecule and at least one siRNA or shRNA molecule is a NFKBIA-targeting siRNA or shRNA molecule. In some embodiments, the at least one CBLB-targeting nucleic acid molecule is an siRNA or an shRNA molecule and at least one NFKBIA-targeting nucleic acid molecule is an siRNA or shRNA molecule. In some embodiments, the at least one CBLB-targeting siRNA or an shRNA molecule binds to a target RNA sequence that is at least 95%, 96%, 97%, 98%, or 99% identical to an RNA sequence encoded by the CBLB gene (SEQ ID NO: 7) or the Cblb gene (SEQ ID NO: 8) and the at least one NFKBIA-targeting siRNA or shRNA molecule binds to a target RNA sequence that is at least 95%, 96%, 97%, 98%, or 99% identical to an RNA sequence encoded by the NFKBIA gene (SEQ ID NO: 11) or the Nfkbia gene (SEQ ID NO: 12). In some embodiments, the at least one CBLB-targeting siRNA or an shRNA molecule binds to a target RNA sequence that is 100% identical to an RNA sequence encoded by the CBLB gene (SEQ ID NO: 7) or the Cblb gene (SEQ ID NO: 8) and the at least one NFKBIA-targeting siRNA or shRNA molecule binds to a target RNA sequence that is 100% identical to an RNA sequence encoded by the NFKBIA gene (SEQ ID NO: 11) or the Nfkbia gene (SEQ ID NO: 12).

[0481] In some embodiments, the at least one CBLB-targeting siRNA or shRNA molecule binds to a target RNA sequence that is at least 95%, 96%, 97%, 98%, or 99% identical to an RNA sequence encoded by a DNA sequence defined by a set of genomic coordinates shown in Table 17 or Table 18 and the at least one NFKBIA-targeting siRNA or shRNA molecule binds to a target RNA sequence that is at least 95%, 96%, 97%, 98%, or 99% identical to an RNA sequence encoded by a DNA sequence defined by a set of genomic coordinates shown in Table 21 or Table 22. In some embodiments, the at least one CBLB-targeting siRNA or shRNA molecule binds to a target RNA sequence that is 100% identical to an RNA sequence encoded by a DNA sequence defined by a set of genomic coordinates shown in Table 17 or Table 18 and the at least one NFKBIA-targeting siRNA or shRNA molecule binds to a target RNA sequence that is 100% identical to an RNA sequence encoded by a DNA sequence defined by a set of genomic coordinates shown in Table 21 or Table 22.

[0482] In some embodiments, the at least one CBLB-targeting siRNA or shRNA molecule binds to a target RNA sequence that is at least 95%, 96%, 97%, 98%, or 99% identical to an RNA sequence encoded by one of SEQ ID NOs: 798-823 and the at least one NFKBIA-targeting siRNA or shRNA molecule binds to a target RNA sequence that is at least 95%, 96%, 97%, 98%, or 99% identical to an RNA sequence encoded by one of SEQ ID NOs: 845-875. In some embodiments, the at least one CBLB-targeting siRNA or shRNA molecule binds to a target RNA sequence that is 100% identical to an RNA sequence encoded by one of SEQ ID NOs: 798-823 and the at least one NFKBIA-targeting siRNA or shRNA molecule binds to a target RNA sequence that is 100% identical to an RNA sequence encoded by one of SEQ ID NOs: 845-875.

[0483] In some embodiments, the nucleic acid-based gene-regulating system comprises at least two nucleic acid molecules (e.g., an siRNA, an shRNA, an RNA aptamer, or a morpholino), wherein at least one nucleic acid molecule is a RC3H1-targeting nucleic acid molecule and at least one nucleic acid molecule is a NFKBIA-targeting nucleic acid molecule. In some embodiments, the at least one RC3H1-targeting nucleic acid molecule binds to a target RNA sequence that is at least 95%, 96%, 97%, 98%, or 99% identical to an RNA sequence encoded by the RC3H1 gene (SEQ ID NO: 9) or the Rc3h1 gene (SEQ ID NO: 10) and the at least one NFKBIA-targeting nucleic acid molecule binds to a target RNA sequence that is at least 95%, 96%, 97%, 98%, or 99% identical to an RNA sequence encoded by the NFKBIA gene (SEQ ID NO: 11) or the Nfkbia gene (SEQ ID NO: 12). In some embodiments, the at least one RC3H1-targeting nucleic acid molecule binds to a target RNA sequence that is 100% identical to an RNA sequence encoded by the RC3H1 gene (SEQ ID NO: 9) or the Rc3h1 gene (SEQ ID NO: 10) and the at least one NFKBIA-targeting nucleic acid molecule binds to a target RNA sequence that is 100% identical to an RNA sequence encoded by the NFKBIA gene (SEQ ID NO: 11) or the Nfkbia gene (SEQ ID NO: 12).

[0484] In some embodiments, the at least one RC3H1-targeting nucleic acid molecule binds to a target RNA sequence that is at least 95%, 96%, 97%, 98%, or 99% identical to an RNA sequence encoded by a DNA sequence defined by a set of genomic coordinates shown in Table 19 or Table 20 and the at least one NFKBIA-targeting nucleic acid molecule binds to a target RNA sequence that is at least 95%, 96%, 97%, 98%, or 99% identical to an RNA sequence encoded by a DNA sequence defined by a set of genomic coordinates shown in Table 21 or Table 22. In some embodiments, the at least one RC3H1-targeting nucleic acid molecule binds to a target RNA sequence that is 100% identical to an RNA sequence encoded by a DNA sequence defined by a set of genomic coordinates shown in Table 19 or Table 20 and the at least one NFKBIA-targeting nucleic acid molecule binds to a target RNA sequence that is 100% identical to an RNA sequence encoded by a DNA sequence defined by a set of genomic coordinates shown in Table 21 or Table 22.

[0485] In some embodiments, the at least one RC3H1-targeting nucleic acid molecule binds to a target RNA sequence that is at least 95%, 96%, 97%, 98%, or 99% identical to an RNA sequence encoded by one of SEQ ID NOs: 824-844 and the at least one NFKBIA-targeting nucleic acid molecule binds to a target RNA sequence that is at least 95%, 96%, 97%, 98%, or 99% identical to an RNA sequence encoded by one of SEQ ID NOs: 845-875. In some embodiments, the at least one RC3H1-targeting nucleic acid molecule binds to a target RNA sequence that is 100% identical to an RNA sequence encoded by one of SEQ ID NOs: 824-844 and the at least one NFKBIA-targeting nucleic acid molecule binds to a target RNA sequence that is 100% identical to an RNA sequence encoded by one of SEQ ID NOs: 845-875.

[0486] In some embodiments, the nucleic acid-based gene-regulating system comprises at least two siRNA or shRNA molecules, wherein at least one siRNA or shRNA molecule is a RC3H1-targeting siRNA or shRNA molecule and at least one siRNA or shRNA molecule is a NFKBIA-targeting siRNA or shRNA molecule. In some embodiments, the at least one RC3H1-targeting nucleic acid molecule is an siRNA or an shRNA molecule and at least one NFKBIA-targeting nucleic acid molecule is an siRNA or shRNA molecule. In some embodiments, the at least one RC3H1-targeting siRNA or an shRNA molecule binds to a target RNA sequence that is at least 95%, 96%, 97%, 98%, or 99% identical to an RNA sequence encoded by the RC3H1 gene (SEQ ID NO: 9) or the Rc3h1 gene (SEQ ID NO: 10) and the at least one NFKBIA-targeting siRNA or shRNA molecule binds to a target RNA sequence that is at least 95%, 96%, 97%, 98%, or 99% identical to an RNA sequence encoded by the NFKBIA gene (SEQ ID NO: 11) or the Nfkbia gene (SEQ ID NO: 12). In some embodiments, the at least one RC3H1-targeting siRNA or an shRNA molecule binds to a target RNA sequence that is 100% identical to an RNA sequence encoded by the RC3H1 gene (SEQ ID NO: 9) or the Rc3h1 gene (SEQ ID NO: 10) and the at least one NFKBIA-targeting siRNA or shRNA molecule binds to a target RNA sequence that is 100% identical to an RNA sequence encoded by the NFKBIA gene (SEQ ID NO: 11) or the Nfkbia gene (SEQ ID NO: 12).

[0487] In some embodiments, the at least one RC3H1-targeting siRNA or shRNA molecule binds to a target RNA sequence that is at least 95%, 96%, 97%, 98%, or 99% identical to an RNA sequence encoded by a DNA sequence defined by a set of genomic coordinates shown in Table 19 or Table 20 and the at least one NFKBIA-targeting siRNA or shRNA molecule binds to a target RNA sequence that is at least 95%, 96%, 97%, 98%, or 99% identical to an RNA sequence encoded by a DNA sequence defined by a set of genomic coordinates shown in Table 21 or Table 22. In some embodiments, the at least one RC3H1-targeting siRNA or shRNA molecule binds to a target RNA sequence that is 100% identical to an RNA sequence encoded by a DNA sequence defined by a set of genomic coordinates shown in Table 19 or Table 20 and the at least one NFKBIA-targeting siRNA or shRNA molecule binds to a target RNA sequence that is 100% identical to an RNA sequence encoded by a DNA sequence defined by a set of genomic coordinates shown in Table 21 or Table 22.

[0488] In some embodiments, the at least one RC3H1-targeting siRNA or shRNA molecule binds to a target RNA sequence that is at least 95%, 96%, 97%, 98%, or 99% identical to an RNA sequence encoded by one of SEQ ID NOs: 824-844 and the at least one NFKBIA-targeting siRNA or shRNA molecule binds to a target RNA sequence that is at least 95%, 96%, 97%, 98%, or 99% identical to an RNA sequence encoded by one of SEQ ID NOs: 845-875. In some embodiments, the at least one RC3H1-targeting siRNA or shRNA molecule binds to a target RNA sequence that is 100% identical to an RNA sequence encoded by one of SEQ ID NOs: 824-844 and the at least one NFKBIA-targeting siRNA or shRNA molecule binds to a target RNA sequence that is 100% identical to an RNA sequence encoded by one of SEQ ID NOs: 845-875.

### Protein-Based Gene-Regulating Systems

[0489] In some embodiments, the present disclosure provides protein gene-regulating systems comprising one, two or more proteins capable of reducing the expression and/or function of at least one, two or more endogenous genes selected from ANKRD11, BCL2L11, BCL3, BCOR, CALM2, CBLB, CHIC2, CTLA4, DHODH, E2F8, EGR2, FLI1, FOXP3, GATA3, GNAS, HAVCR2, IKZF1, IKZF2, IKZF3, LAG3, MAP4K, NFKBIA, NR4A3, NRP1, PBRM1, PCBP1, PDCD1, PELI1, PIK3CD, PPP2R2D, PTPN1, PTPN2, PTPN22, PTPN6, RBM39, RC3H1, SEMA7A, SERPINA3, SETD5, SH2B3, SH2D1A, SMAD2, SOCS1, TANK, TGFBR1, TGFBR2, TIGIT, TNFAIP3, TNIP1, TRAF6, UMPS, WDR6 and ZC3H12A. (See International Publication Nos. WO 2019/178422, WO 2019/178420 and WO 2019/178421, incorporated by reference herein in their entireties.) In some embodiments, the present disclosure provides protein gene-regulating systems comprising one, two or more proteins capable of reducing the expression and/or function of at least one, two or more endogenous genes selected from SOCS1, PTPN2, ZC3H12A, CBLB, RC3H1 and NFKBIA. In some embodiments, the present disclosure provides modified TILs manufactured by the methods described herein comprising such gene-regulating systems. In some embodiments, a protein-based gene-regulating system is a system comprising one or more proteins capable of regulating the expression of an endogenous target gene in a sequence specific manner without the requirement for a nucleic acid guide molecule. In some embodiments, the protein-based gene-regulating system comprises a protein comprising one or more zinc-finger binding domains and an enzymatic domain. In some embodiments, the protein-based gene-regulating system comprises a protein comprising a Transcription activator-like effector nuclease (TALEN) domain and an enzymatic domain. Such embodiments are referred to herein as “TALENs”.

### Zinc Finger Systems

[0490] In some embodiments, the present disclosure provides zinc finger gene-regulating systems comprising one, two or more zinc finger fusion proteins capable of reducing the expression and/or function of at least one, two or more endogenous genes selected from SOCS1, PTPN2, ZC3H12A, CBLB, RC3H1 and NFKBIA. In some embodiments, the present disclosure provides modified TILs manufactured by the methods described herein comprising such gene-regulating systems. Herein, zinc finger-based systems comprise a fusion protein with two protein domains: a zinc finger DNA binding domain and an enzymatic domain. A “zinc finger DNA binding domain”, “zinc finger protein”, or “ZFP” is a protein, or a domain within a larger protein, that binds DNA in a sequence-specific manner through one or more zinc fingers, which are regions of amino acid sequence within the binding domain whose structure is stabilized through coordination of a zinc ion. The zinc finger domain, by binding to a target DNA sequence, directs the activity of the enzymatic domain to the vicinity of the sequence and, hence, induces modification of the endogenous target gene in the vicinity of the target sequence. A zinc finger domain can be engineered to bind to virtually any desired sequence. Accordingly, after identifying a target genetic locus containing a target DNA sequence at which cleavage or recombination is desired (e.g., a target locus in a target gene referenced in Tables 2 or 3), one or more zinc finger binding domains can be engineered to bind to one or more target DNA sequences in the target genetic locus. Expression of a fusion protein comprising a zinc finger binding domain and an enzymatic domain in a cell, effects modification in the target genetic locus.

[0491] In some embodiments, a zinc finger binding domain comprises one or more zinc fingers. Miller et al. (1985) EMBO J. 4:1609-1614; Rhodes (1993) Scientific American February:56-65; U.S. Pat. No. 6,453,242. Typically, a single zinc finger domain is about 30 amino acids in length. An individual zinc finger binds to a three-nucleotide (i.e., triplet) sequence (or a four-nucleotide sequence which can overlap, by one nucleotide, with the four-nucleotide binding site of an adjacent zinc finger). Therefore, the length of a sequence to which a zinc finger binding domain is engineered to bind (e.g., a target sequence) will determine the number of zinc fingers in an engineered zinc finger binding domain. For example, for ZFPs in which the finger motifs do not bind to overlapping subsites, a six-nucleotide target sequence is bound by a two-finger binding domain; a nine-nucleotide target sequence is bound by a three-finger binding domain, etc. Binding sites for individual zinc fingers (i.e., subsites) in a target site need not be contiguous, but can be separated by one or several nucleotides, depending on the length and nature of the amino acid sequences between the zinc fingers (i.e., the inter-finger linkers) in a multi-finger binding domain. In some embodiments, the DNA-binding domains of individual ZFPs comprise between three and six individual zinc finger repeats and can each recognize between 9 and 18 base pairs.

[0492] Zinc finger binding domains can be engineered to bind to a sequence of choice. See, for example, Beerli et al. (2002) Nature Biotechnol. 20:135-141; Pabo et al. (2001) Ann. Rev. Biochem. 70:313-340; Isalan et al. (2001) Nature Biotechnol. 19:656-660; Segal et al. (2001) Curr. Opin. Biotechnol. 12:632-637; Choo et al. (2000) Curr. Opin. Struct. Biol. 10:411-416. An engineered zinc finger binding domain can have a novel binding specificity, compared to a naturally-occurring zinc finger protein. Engineering methods include, but are not limited to, rational design and various types of selection.

[0493] Selection of a target DNA sequence for binding by a zinc finger domain can be accomplished, for example, according to the methods disclosed in U.S. Pat. No. 6,453,242. It will be clear to those skilled in the art that simple visual inspection of a nucleotide sequence can also be used for selection of a target DNA sequence. Accordingly, any means for target DNA sequence selection can be used in the methods described herein. A target site generally has a length of at least 9 nucleotides and, accordingly, is bound by a zinc finger binding domain comprising at least three zinc fingers. However, binding of, for example, a 4-finger binding domain to a 12-nucleotide target site, a 5-finger binding domain to a 15-nucleotide target site or a 6-finger binding domain to an 18-nucleotide target site, is also possible. As will be apparent, binding of larger binding domains (e.g., 7-, 8-, 9-finger and more) to longer target sites is also possible.

[0494] In some embodiments, the protein-based gene-regulating system comprises at least one zinc finger fusion protein (ZFP) that comprises a SOCS1-targeting zinc finger binding domain. In some embodiments, the at least one SOCS1-targeting zinc finger binding domain binds to a target DNA sequence that is at least 95%, 96%, 97%, 98%, or 99% identical to a target DNA sequence in the SOCS1 gene (SEQ ID NO: 1) or the Socs1 gene (SEQ ID NO: 2). In some embodiments, the at least one SOCS1-targeting zinc finger binding domain binds to a target DNA sequence that is 100% identical to a target DNA sequence in the SOCS1 gene (SEQ ID NO: 1) or the Socs1 gene (SEQ ID NO: 2).

[0495] In some embodiments, the at least one SOCS1-targeting zinc finger binding domain binds to a target DNA sequence that is at least 95%, 96%, 97%, 98%, or 99% identical to a DNA sequence defined by a set of genomic coordinates shown in Table 4 or Table 5. In some embodiments, the at least one SOCS1-targeting zinc finger binding domain binds to a target DNA sequence that is 100% identical to a DNA sequence defined by a set of genomic coordinates shown in Table 4 or Table 5. In some embodiments, the at least one SOCS1-targeting zinc finger binding domain binds to a target DNA sequence that is at least 90%, 95%, 96%, 97%, 98%, or 99% identical to one of SEQ ID NOs: 23-200. In some embodiments, the at least one SOCS1-targeting zinc finger binding domain binds to a target DNA sequence that is 100% identical to one of SEQ ID NOs: 23-200.

[0496] In some embodiments, the protein-based gene-regulating system comprises at least one zinc finger fusion protein (ZFP) that comprises a PTPN2-targeting zinc finger binding domain. In some embodiments, the at least one PTPN2-targeting zinc finger binding domain binds to a target DNA sequence that is at least 95%, 96%, 97%, 98%, or 99% identical to a target DNA sequence in the PTPN2 gene (SEQ ID NO: 3) or the Ptpn2 gene (SEQ ID NO: 4). In some embodiments, the at least one PTPN2-targeting zinc finger binding domain binds to a target DNA sequence that is 100% identical to a target DNA sequence in the PTPN2 gene (SEQ ID NO: 3) or the Ptpn2 gene (SEQ ID NO: 4).

[0497] In some embodiments, the at least one PTPN2-targeting zinc finger binding domain binds to a target DNA sequence that is at least 95%, 96%, 97%, 98%, or 99% identical to a DNA sequence defined by a set of genomic coordinates shown in Table 9 or Table 10. In some embodiments, the at least one PTPN2-targeting zinc finger binding domain binds to a target DNA sequence that is 100% identical to a DNA sequence defined by a set of genomic coordinates shown in Table 9 or Table 10. In some embodiments, the at least one PTPN2-targeting zinc finger binding domain binds to a target DNA sequence that is at least 95%, 96%, 97%, 98%, or 99% identical to one of SEQ ID NOs: 201-327. In some embodiments, the at least one PTPN2-targeting zinc finger binding domain binds to a target DNA sequence that is 100% identical to one of SEQ ID NOs: 201-327.

[0498] In some embodiments, the protein-based gene-regulating system comprises at least one zinc finger fusion protein (ZFP) that comprises a ZC3H12A-targeting zinc finger binding domain. In some embodiments, the at least one ZC3H12A-targeting zinc finger binding domain binds to a target DNA sequence that is at least 95%, 96%, 97%, 98%, or 99% identical to a target DNA sequence in the ZC3H12A gene (SEQ ID NO: 5) or the Zc3h12a gene (SEQ ID NO: 6). In some embodiments, the at least one ZC3H12A-targeting zinc finger binding domain binds to a target DNA sequence that is 100% identical to a target DNA sequence in the ZC3H12A gene (SEQ ID NO: 5) or the Zc3h12a gene (SEQ ID NO: 6).

[0499] In some embodiments, the at least one ZC3H12A-targeting zinc finger binding domain binds to a target DNA sequence that is at least 95%, 96%, 97%, 98%, or 99% identical to a DNA sequence defined by a set of genomic coordinates shown in Table 11 or Table 12. In some embodiments, the at least one ZC3H12A-targeting zinc finger binding domain binds to a target DNA sequence that is 100% identical to a DNA sequence defined by a set of genomic coordinates shown in Table 11 or Table 12. In some embodiments, the at least one ZC3H12A-targeting zinc finger binding domain binds to a target DNA sequence that is at least 95%, 96%, 97%, 98%, or 99% identical to one of SEQ ID NOs: 331-797. In some embodiments, the at least one ZC3H12A-targeting zinc finger binding domain binds to a target DNA sequence that is 100% identical to one of SEQ ID NOs: 331-797.

[0500] In some embodiments, the protein-based gene-regulating system comprises at least one TALEN fusion protein that comprises a CBLB-targeting zinc finger binding domain. In some embodiments, the at least one CBLB-targeting zinc finger binding domain binds to a target DNA sequence that is at least 95%, 96%, 97%, 98%, or 99% identical to a target DNA sequence in the CBLB gene (SEQ ID NO: 7) or the Cblb gene (SEQ ID NO: 8). In some embodiments, the at least one CBLB-targeting zinc finger binding domain binds to a target DNA sequence that is 100% identical to a target DNA sequence in the CBLB gene (SEQ ID NO: 7) or the Cblb gene (SEQ ID NO: 8).

[0501] In some embodiments, the at least one CBLB-targeting zinc finger binding domain binds to a target DNA sequence that is at least 95%, 96%, 97%, 98%, or 99% identical to a DNA sequence defined by a set of genomic coordinates shown in Table 17 or Table 18. In some embodiments, the at least one CBLB-targeting zinc finger binding domain binds to a target DNA sequence that is 100% identical to a DNA sequence defined by a set of genomic coordinates shown in Table 17 or Table 18. In some embodiments, the at least one CBLB-targeting zinc finger binding domain binds to a target DNA sequence that is at least 95%, 96%, 97%, 98%, or 99% identical to one of SEQ ID NOs: 798-823. In some embodiments, the at least one CBLB-targeting zinc finger binding domain binds to a target DNA sequence that is 100% identical to one of SEQ ID NOs: 798-823.

[0502] In some embodiments, the protein-based gene-regulating system comprises at least one TALEN fusion protein that comprises a RC3H1-targeting zinc finger binding domain. In some embodiments, the at least one RC3H1-targeting zinc finger binding domain binds to a target DNA sequence that is at least 95%, 96%, 97%, 98%, or 99% identical to a target DNA sequence in the RC3H1 gene (SEQ ID NO: 9) or the Rc3h1 gene (SEQ ID NO: 10). In some embodiments, the at least one RC3H1-targeting zinc finger binding domain binds to a target DNA sequence that is 100% identical to a target DNA sequence in the RC3H1 gene (SEQ ID NO: 9) or the Rc3h1 gene (SEQ ID NO: 10).

[0503] In some embodiments, the at least one RC3H1-targeting zinc finger binding domain binds to a target DNA sequence that is at least 95%, 96%, 97%, 98%, or 99% identical to a DNA sequence defined by a set of genomic coordinates shown in Table 19 or Table 20. In some embodiments, the at least one RC3H1-targeting zinc finger binding domain binds to a target DNA sequence that is 100% identical to a DNA sequence defined by a set of genomic coordinates shown in Table 19 or Table 20. In some embodiments, the at least one RC3H1-targeting zinc finger binding domain binds to a target DNA sequence that is at least 95%, 96%, 97%, 98%, or 99% identical to one of SEQ ID NOs: 824-844. In some embodiments, the at least one RC3H1-targeting zinc finger binding domain binds to a target DNA sequence that is 100% identical to one of SEQ ID NOs: 824-844.

[0504] In some embodiments, the protein-based gene-regulating system comprises at least one TALEN fusion protein that comprises a NFKBIA-targeting zinc finger binding domain. In some embodiments, the at least one NFKBIA-targeting zinc finger binding domain binds to a target DNA sequence that is at least 95%, 96%, 97%, 98%, or 99% identical to a target DNA sequence in the NFKBIA gene (SEQ ID NO: 11) or the Nfkbia gene (SEQ ID NO: 12). In some embodiments, the at least one NFKBIA-targeting zinc finger binding domain binds to a target DNA sequence that is 100% identical to a target DNA sequence in the NFKBIA gene (SEQ ID NO: 11) or the Nfkbia gene (SEQ ID NO: 12).

[0505] In some embodiments, the at least one NFKBIA-targeting zinc finger binding domain binds to a target DNA sequence that is at least 95%, 96%, 97%, 98%, or 99% identical to a DNA sequence defined by a set of genomic coordinates shown in Table 21 or Table 22. In some embodiments, the at least one NFKBIA-targeting zinc finger binding domain binds to a target DNA sequence that is 100% identical to a DNA sequence defined by a set of genomic coordinates shown in Table 21 or Table 22. In some embodiments, the at least one NFKBIA-targeting zinc finger binding domain binds to a target DNA sequence that is at least 95%, 96%, 97%, 98%, or 99% identical to one of SEQ ID NOs: 845-875. In some embodiments, the at least one NFKBIA-targeting zinc finger binding domain binds to a target DNA sequence that is 100% identical to one of SEQ ID NOs: 845-875.

[0506] In some embodiments, the at least one SOCS1-, PTPN2-, ZC3H12A-, CBLB-, RC3H1- or NFKBIA-targeting ZFP is obtained from commercial suppliers such as Sigma Aldrich, Dharmacon, ThermoFisher, and the like. For example, in some embodiments, the at least one SOCS1, PTPN2, or ZC3H12A ZFP is one shown in Table 25.

TABLE 25
Exemplary SOCS1, PTPN2, and ZC3H12A Zinc Finger Systems

| Target Gene | Zinc Finger System |
|---|---|
| SOCS1 | CompoZr ® Knockout ZFN plasmid Human SOCS1 (NM_003745) |
| | (SigmaAldrich# CKOZFND20320) |
| | CompoZr ® Knockout ZFN plasmid Mouse Socs1 (NM_009896.2) |
| | (SigmaAldrich# CKOZFND41801) |
| PTPN2 | CompoZr ® Knockout ZFN human plasmid PTPN1 (NM_002827) |
| | (SigmaAldrich# CKOZFND2121) |
| | CompoZr ® Knockout ZFN murine plasmid Ptpn1 (NM_011201.3) |
| | (SigmaAldrich# CKOZFND39626) |
| ZC3H12A | CompoZr ® Knockout ZFN Kit, ZFN plasmid Human ZC3H12A |
| | (NM_025079) (SigmaAldrich# CKOZFND23094) |
| | CompoZr ® Knockout ZFN Kit, ZFN plasmid mouse Zc3h12a |
| | (NM_153159.2) (SigmaAldrich# CKOZFND44851) |

[0507] In some embodiments, the protein-based gene-regulating system comprises at least two ZFPs, wherein at least one ZFP comprises a SOCS1-targeting zinc finger binding domain and at least one ZFP comprises a PTPN2-targeting zinc finger binding domain. In some embodiments, the at least one SOCS1-targeting zinc finger binding domain binds to a target DNA sequence that is at least 95%, 96%, 97%, 98%, or 99% identical to a DNA sequence in the SOCS1 gene (SEQ ID NO: 1) or the Socs1 gene (SEQ ID NO: 2) and the at least one PTPN2-targeting zinc finger binding domain binds to a target DNA sequence that is at least 95%, 96%, 97%, 98%, or 99% identical to a DNA sequence the PTPN2 gene (SEQ ID NO: 3) or the Ptpn2 gene (SEQ ID NO: 4). In some embodiments, the at least one SOCS1-targeting zinc finger binding domain binds to a target DNA sequence that is 100% identical to a DNA sequence in the SOCS1 gene (SEQ ID NO: 1) or the Socs1 gene (SEQ ID NO: 2) and the at least one PTPN2-targeting zinc finger binding domain binds to a target DNA sequence that is 100% identical to a DNA sequence in the PTPN2 gene (SEQ ID NO: 3) or the Ptpn2 gene (SEQ ID NO: 4).

[0508] In some embodiments, the at least one SOCS1-targeting zinc finger binding domain binds to a target DNA sequence that is at least 95%, 96%, 97%, 98%, or 99% identical to a DNA sequence defined by a set of genomic coordinates shown in Table 4 or Table 5 and the at least one PTPN2-targeting zinc finger binding domain binds to a target DNA sequence that is at least 95%, 96%, 97%, 98%, or 99% identical to a DNA sequence defined by a set of genomic coordinates shown in Table 9 or Table 10. In some embodiments, the at least one SOCS1-targeting zinc finger binding domain binds to a target DNA sequence that is 100% identical to a DNA sequence defined by a set of genomic coordinates shown in Table 4 or Table 5 and the at least one PTPN2-targeting zinc finger binding domain binds to a target DNA sequence that is 100% identical to a DNA sequence defined by a set of genomic coordinates shown in Table 9 or Table 10.

[0509] In some embodiments, the at least one SOCS1-targeting zinc finger binding domain binds to a target DNA sequence that is at least 95%, 96%, 97%, 98%, or 99% identical to one of SEQ ID NOs: 23-200 or 56-187 and the at least one PTPN2-targeting zinc finger binding domain binds to a target DNA sequence that is at least 95%, 96%, 97%, 98%, or 99% identical to one of SEQ ID NOs: 201-327 or 201-314. In some embodiments, the at least one SOCS1-targeting zinc finger binding domain binds to a target DNA sequence that is 100% identical to one of SEQ ID NOs: 23-200 or 56-187 and the at least one PTPN2-targeting zinc finger binding domain binds to a target DNA sequence that is 100% identical to one of SEQ ID NOs: 201-327 or 201-314.

[0510] In some embodiments, the protein-based gene-regulating system comprises at least two ZFPs, wherein at least one ZFP comprises a SOCS1-targeting zinc finger binding domain and at least one ZFP comprises a ZC3H12A-targeting zinc finger binding domain. In some embodiments, the at least one SOCS1-targeting zinc finger binding domain binds to a target DNA sequence that is at least 95%, 96%, 97%, 98%, or 99% identical to a DNA sequence in the SOCS1 gene (SEQ ID NO: 1) or the Socs1 gene (SEQ ID NO: 2) and the at least one ZC3H12A-targeting zinc finger binding domain binds to a target DNA sequence that is at least 95%, 96%, 97%, 98%, or 99% identical to a DNA sequence in the ZC3H12A gene (SEQ ID NO: 5) or the Zc3h12a gene (SEQ ID NO: 6). In some embodiments, the at least one SOCS1-targeting zinc finger binding domain binds to a target DNA sequence that is 100% identical to a DNA sequence in the SOCS1 gene (SEQ ID NO: 1) or the Socs1 gene (SEQ ID NO: 2) and the at least one ZC3H12A-targeting zinc finger binding domain binds to a target DNA sequence that is 100% identical to a DNA sequence in the ZC3H12A gene (SEQ ID NO: 5) or the Zc3h12a gene (SEQ ID NO: 6).

[0511] In some embodiments, the at least one SOCS1-targeting zinc finger binding domain binds to a target DNA sequence that is at least 95%, 96%, 97%, 98%, or 99% identical to a DNA sequence defined by a set of genomic coordinates shown in Table 4 or Table 5 and the at least one ZC3H12A-targeting zinc finger binding domain binds to a target DNA sequence that is at least 95%, 96%, 97%, 98%, or 99% identical to a DNA sequence defined by a set of genomic coordinates shown in Table 11 or Table 12. In some embodiments, the at least one SOCS1-targeting zinc finger binding domain binds to a target DNA sequence that is 100% identical to a DNA sequence defined by a set of genomic coordinates shown in Table 4 or Table 5 and the at least one ZC3H12A-targeting zinc finger binding domain binds to a target DNA sequence that is 100% identical to a DNA sequence defined by a set of genomic coordinates shown in Table 11 or Table 12.

[0512] In some embodiments, the at least one SOCS1-targeting zinc finger binding domain binds to a target DNA sequence that is at least 95%, 96%, 97%, 98%, or 99% identical to one of SEQ ID NOs: 23-200 or 56-187 and the at least one ZC3H12A-targeting zinc finger binding domain binds to a target DNA sequence that is at least 95%, 96%, 97%, 98%, or 99% identical to one of SEQ ID NOs: 331-797 or 338-789. In some embodiments, the at least one SOCS1-targeting zinc finger binding domain binds to a target DNA sequence that is 100% identical to one of SEQ ID NOs: 23-200 or 56-187 and the at least one ZC3H12A-targeting zinc finger binding domain binds to a target DNA sequence that is 100% identical to one of SEQ ID NOs: 331-797 or 338-789.

[0513] In some embodiments, the protein-based gene-regulating system comprises at least two ZFPs, wherein at least one ZFP comprises a PTPN2-targeting zinc finger binding domain and at least one ZFP comprises a ZC3H12A-targeting zinc finger binding domain. In some embodiments, the at least one PTPN2-targeting zinc finger binding domain binds to a target DNA sequence that is at least 95%, 96%, 97%, 98%, or 99% identical to a DNA sequence in the PTPN2 gene (SEQ ID NO: 3) or the Ptpn2 gene (SEQ ID NO: 4) and the at least one ZC3H12A-targeting zinc finger binding domain binds to a target DNA sequence that is at least 95%, 96%, 97%, 98%, or 99% identical to a DNA sequence in the ZC3H12A gene (SEQ ID NO: 5) or the Zc3h12a gene (SEQ ID NO: 6). In some embodiments, the at least one PTPN2-targeting zinc finger binding domain binds to a target DNA sequence that is 100% identical to a DNA sequence in the PTPN2 gene (SEQ ID NO: 3) or the Ptpn2 gene (SEQ ID NO: 4) and the at least one ZC3H12A-targeting zinc finger binding domain binds to a target DNA sequence that is 100% identical to a DNA sequence in the ZC3H12A gene (SEQ ID NO: 5) or the Zc3h12a gene (SEQ ID NO: 6).

[0514] In some embodiments, the at least one PTPN2-targeting zinc finger binding domain binds to a target DNA sequence that is at least 95%, 96%, 97%, 98%, or 99% identical to a DNA sequence defined by a set of genomic coordinates shown in Table 9 or Table 10 and the at least one ZC3H12A-targeting zinc finger binding domain binds to a target DNA sequence that is at least 95%, 96%, 97%, 98%, or 99% identical to a DNA sequence defined by a set of genomic coordinates shown in Table 11 or Table 12. In some embodiments, the at least one PTPN2-targeting zinc finger binding domain binds to a target DNA sequence that is 100% identical to a DNA sequence defined by a set of genomic coordinates shown in Table 9 or Table 10 and the at least one ZC3H12A-targeting zinc finger binding domain binds to a target DNA sequence that is 100% identical to a DNA sequence defined by a set of genomic coordinates shown in Table 11 or Table 12.

[0515] In some embodiments, the at least one PTPN2-targeting zinc finger binding domain binds to a target DNA sequence that is at least 95%, 96%, 97%, 98%, or 99% identical to one of SEQ ID NOs: 201-327 or 201-314 and the at least one ZC3H12A-targeting zinc finger binding domain binds to a target DNA sequence that is at least 95%, 96%, 97%, 98%, or 99% identical to one of SEQ ID NOs: 331-797 or 338-789. In some embodiments, the at least one PTPN2-targeting zinc finger binding domain binds to a target DNA sequence that is 100% identical to one of SEQ ID NOs: 201-327 or 201-314 and the at least one ZC3H12A-targeting zinc finger binding domain binds to a target DNA sequence that is 100% identical to one of SEQ ID NOs: 331-797 or 338-789.

[0516] In some embodiments, the protein-based gene-regulating system comprises at least two ZFPs, wherein at least one ZFP comprises a CBLB-targeting zinc finger binding domain and at least one ZFP comprises a PTPN2-targeting zinc finger binding domain. In some embodiments, the at least one CBLB-targeting zinc finger binding domain binds to a target DNA sequence that is at least 95%, 96%, 97%, 98%, or 99% identical to a DNA sequence in the CBLB gene (SEQ ID NO: 7) or the Cblb gene (SEQ ID NO: 8) and the at least one PTPN2-targeting zinc finger binding domain binds to a target DNA sequence that is at least 95%, 96%, 97%, 98%, or 99% identical to a DNA sequence in the PTPN2 gene (SEQ ID NO: 3) or the Ptpn2 gene (SEQ ID NO: 4). In some embodiments, the at least one CBLB-targeting zinc finger binding domain binds to a target DNA sequence that is 100% identical to a DNA sequence in the CBLB gene (SEQ ID NO: 7) or the Cblb gene (SEQ ID NO: 8) and the at least one PTPN2-targeting zinc finger binding domain binds to a target DNA sequence that is 100% identical to a DNA sequence in the PTPN2 gene (SEQ ID NO: 3) or the Ptpn2 gene (SEQ ID NO: 4).

[0517] In some embodiments, the at least one CBLB-targeting zinc finger binding domain binds to a target DNA sequence that is at least 95%, 96%, 97%, 98%, or 99% identical to a DNA sequence defined by a set of genomic coordinates shown in Table 17 or Table 18 and the at least one PTPN2-targeting zinc finger binding domain binds to a target DNA sequence that is at least 95%, 96%, 97%, 98%, or 99% identical to a DNA sequence defined by a set of genomic coordinates shown in Table 9 or Table 10. In some embodiments, the at least one CBLB-targeting zinc finger binding domain binds to a target DNA sequence that is 100% identical to a DNA sequence defined by a set of genomic coordinates shown in Table 17 or Table 18 and the at least one PTPN2-targeting zinc finger binding domain binds to a target DNA sequence that is 100% identical to a DNA sequence defined by a set of genomic coordinates shown in Table 9 or Table 10.

[0518] In some embodiments, the at least one CBLB-targeting zinc finger binding domain binds to a target DNA sequence that is at least 95%, 96%, 97%, 98%, or 99% identical to one of SEQ ID NOs: 798-823 or 798-808 and the at least one PTPN2-targeting zinc finger binding domain binds to a target DNA sequence that is at least 95%, 96%, 97%, 98%, or 99% identical to one of SEQ ID NOs: 201-327 or 201-314. In some embodiments, the at least one CBLB-targeting zinc finger binding domain binds to a target DNA sequence that is 100% identical to one of SEQ ID NOs: 798-823 or 798-808 and the at least one PTPN2-targeting zinc finger binding domain binds to a target DNA sequence that is 100% identical to one of SEQ ID NOs: 201-327 or 201-314.

[0519] In some embodiments, the protein-based gene-regulating system comprises at least two ZFPs, wherein at least one ZFP comprises a CBLB-targeting zinc finger binding domain and at least one ZFP comprises a ZC3H12A-targeting zinc finger binding domain. In some embodiments, the at least one CBLB-targeting zinc finger binding domain binds to a target DNA sequence that is at least 95%, 96%, 97%, 98%, or 99% identical to a DNA sequence in the CBLB gene (SEQ ID NO: 7) or the Cblb gene (SEQ ID NO: 8) and the at least one ZC3H12A-targeting zinc finger binding domain binds to a target DNA sequence that is at least 95%, 96%, 97%, 98%, or 99% identical to a DNA sequence in the ZC3H12A gene (SEQ ID NO: 5) or the Zc3h12a gene (SEQ ID NO: 6). In some embodiments, the at least one CBLB-targeting zinc finger binding domain binds to a target DNA sequence that is 100% identical to a DNA sequence in the CBLB gene (SEQ ID NO: 7) or the Cblb gene (SEQ ID NO: 8) and the at least one ZC3H12A-targeting zinc finger binding domain binds to a target DNA sequence that is 100% identical to a DNA sequence in the ZC3H12A gene (SEQ ID NO: 5) or the Zc3h12a gene (SEQ ID NO: 6).

[0520] In some embodiments, the at least one CBLB-targeting zinc finger binding domain binds to a target DNA sequence that is at least 95%, 96%, 97%, 98%, or 99% identical to a DNA sequence defined by a set of genomic coordinates shown in Table 17 or Table 18 and the at least one ZC3H12A-targeting zinc finger binding domain binds to a target DNA sequence that is at least 95%, 96%, 97%, 98%, or 99% identical to a DNA sequence defined by a set of genomic coordinates shown in Table 11 or Table 12. In some embodiments, the at least one CBLB-targeting zinc finger binding domain binds to a target DNA sequence that is 100% identical to a DNA sequence defined by a set of genomic coordinates shown in Table 17 or Table 18 and the at least one ZC3H12A-targeting zinc finger binding domain binds to a target DNA sequence that is 100% identical to a DNA sequence defined by a set of genomic coordinates shown in Table 11 or Table 12.

[0521] In some embodiments, the at least one CBLB-targeting zinc finger binding domain binds to a target DNA sequence that is at least 95%, 96%, 97%, 98%, or 99% identical to one of SEQ ID NOs: 798-823 or 798-808 and the at least one ZC3H12A-targeting zinc finger binding domain binds to a target DNA sequence that is at least 95%, 96%, 97%, 98%, or 99% identical to one of SEQ ID NOs: 331-797 or 338-789. In some embodiments, the at least one CBLB-targeting zinc finger binding domain binds to a target DNA sequence that is 100% identical to one of SEQ ID NOs: 798-823 or 798-808 and the at least one ZC3H12A-targeting zinc finger binding domain binds to a target DNA sequence that is 100% identical to one of SEQ ID NOs: 331-797 or 338-789.

[0522] In some embodiments, the protein-based gene-regulating system comprises at least two ZFPs, wherein at least one ZFP comprises a SOCS1-targeting zinc finger binding domain and at least one ZFP comprises a CBLB-targeting zinc finger binding domain. In some embodiments, the at least one SOCS1-targeting zinc finger binding domain binds to a target DNA sequence that is at least 95%, 96%, 97%, 98%, or 99% identical to a DNA sequence in the SOCS1 gene (SEQ ID NO: 1) or the Socs1 gene (SEQ ID NO: 2) and the at least one CBLB-targeting zinc finger binding domain binds to a target DNA sequence that is at least 95%, 96%, 97%, 98%, or 99% identical to a DNA sequence in the CBLB gene (SEQ ID NO: 7) or the Cblb gene (SEQ ID NO: 8). In some embodiments, the at least one SOCS1-targeting zinc finger binding domain binds to a target DNA sequence that is 100% identical to a DNA sequence in the SOCS1 gene (SEQ ID NO: 1) or the Socs1 gene (SEQ ID NO: 2) and the at least one CBLB-targeting zinc finger binding domain binds to a target DNA sequence that is 100% identical to a DNA sequence in the CBLB gene (SEQ ID NO: 7) or the Cblb gene (SEQ ID NO: 8).

[0523] In some embodiments, the at least one SOCS1-targeting zinc finger binding domain binds to a target DNA sequence that is at least 95%, 96%, 97%, 98%, or 99% identical to a DNA sequence defined by a set of genomic coordinates shown in Table 4 or Table 5 and the at least one CBLB-targeting zinc finger binding domain binds to a target DNA sequence that is at least 95%, 96%, 97%, 98%, or 99% identical to a DNA sequence defined by a set of genomic coordinates shown in Table 17 or Table 18. In some embodiments, the at least one SOCS1-targeting zinc finger binding domain binds to a target DNA sequence that is 100% identical to a DNA sequence defined by a set of genomic coordinates shown in Table 4 or Table 5 and the at least one CBLB-targeting zinc finger binding domain binds to a target DNA sequence that is 100% identical to a DNA sequence defined by a set of genomic coordinates shown in Table 17 or Table 18.

[0524] In some embodiments, the at least one SOCS1-targeting zinc finger binding domain binds to a target DNA sequence that is at least 95%, 96%, 97%, 98%, or 99% identical to one of SEQ ID NOs: 23-200 or 56-187 and the at least one CBLB-targeting zinc finger binding domain binds to a target DNA sequence that is at least 95%, 96%, 97%, 98%, or 99% identical to one of SEQ ID NOs: 798-823 or 798-808. In some embodiments, the at least one SOCS1-targeting zinc finger binding domain binds to a target DNA sequence that is 100% identical to one of SEQ ID NOs: 23-200 or 56-187 and the at least one CBLB-targeting zinc finger binding domain binds to a target DNA sequence that is 100% identical to one of SEQ ID NOs: 798-823 or 798-808.

[0525] In some embodiments, the protein-based gene-regulating system comprises at least two ZFPs, wherein at least one ZFP comprises a RC3H1-targeting zinc finger binding domain and at least one ZFP comprises a PTPN2-targeting zinc finger binding domain. In some embodiments, the at least one RC3H1-targeting zinc finger binding domain binds to a target DNA sequence that is at least 95%, 96%, 97%, 98%, or 99% identical to a DNA sequence in the RC3H1 gene (SEQ ID NO: 9) or the Rc3h1 gene (SEQ ID NO: 10) and the at least one PTPN2-targeting zinc finger binding domain binds to a target DNA sequence that is at least 95%, 96%, 97%, 98%, or 99% identical to a DNA sequence in the PTPN2 gene (SEQ ID NO: 3) or the Ptpn2 gene (SEQ ID NO: 4). In some embodiments, the at least one RC3H1-targeting zinc finger binding domain binds to a target DNA sequence that is 100% identical to a DNA sequence in the RC3H1 gene (SEQ ID NO: 9) or the Rc3h1 gene (SEQ ID NO: 10) and the at least one PTPN2-targeting zinc finger binding domain binds to a target DNA sequence that is 100% identical to a DNA sequence in the PTPN2 gene (SEQ ID NO: 3) or the Ptpn2 gene (SEQ ID NO: 4).

[0526] In some embodiments, the at least one RC3H1-targeting zinc finger binding domain binds to a target DNA sequence that is at least 95%, 96%, 97%, 98%, or 99% identical to a DNA sequence defined by a set of genomic coordinates shown in Table 19 or Table 20 and the at least one PTPN2-targeting zinc finger binding domain binds to a target DNA sequence that is at least 95%, 96%, 97%, 98%, or 99% identical to a DNA sequence defined by a set of genomic coordinates shown in Table 9 or Table 10. In some embodiments, the at least one RC3H1-targeting zinc finger binding domain binds to a target DNA sequence that is 100% identical to a DNA sequence defined by a set of genomic coordinates shown in Table 19 or Table 20 and the at least one PTPN2-targeting zinc finger binding domain binds to a target DNA sequence that is 100% identical to a DNA sequence defined by a set of genomic coordinates shown in Table 9 or Table 10.

[0527] In some embodiments, the at least one RC3H1-targeting zinc finger binding domain binds to a target DNA sequence that is at least 95%, 96%, 97%, 98%, or 99% identical to one of SEQ ID NOs: 824-844 or 824-836 and the at least one PTPN2-targeting zinc finger binding domain binds to a target DNA sequence that is at least 95%, 96%, 97%, 98%, or 99% identical to one of SEQ ID NOs: 201-327 or 201-314. In some embodiments, the at least one RC3H1-targeting zinc finger binding domain binds to a target DNA sequence that is 100% identical to one of SEQ ID NOs: 824-844 or 824-836 and the at least one PTPN2-targeting zinc finger binding domain binds to a target DNA sequence that is 100% identical to one of SEQ ID NOs: 201-327 or 201-314.

[0528] In some embodiments, the protein-based gene-regulating system comprises at least two ZFPs, wherein at least one ZFP comprises a RC3H1-targeting zinc finger binding domain and at least one ZFP comprises a ZC3H12A-targeting zinc finger binding domain. In some embodiments, the at least one RC3H1-targeting zinc finger binding domain binds to a target DNA sequence that is at least 95%, 96%, 97%, 98%, or 99% identical to a DNA sequence in the RC3H1 gene (SEQ ID NO: 9) or the Rc3h1 gene (SEQ ID NO: 10) and the at least one ZC3H12A-targeting zinc finger binding domain binds to a target DNA sequence that is at least 95%, 96%, 97%, 98%, or 99% identical to a DNA sequence in the ZC3H12A gene (SEQ ID NO: 5) or the Zc3h12a gene (SEQ ID NO: 6). In some embodiments, the at least one RC3H1-targeting zinc finger binding domain binds to a target DNA sequence that is 100% identical to a DNA sequence in the RC3H1 gene (SEQ ID NO: 9) or the Rc3h1 gene (SEQ ID NO: 10) and the at least one ZC3H12A-targeting zinc finger binding domain binds to a target DNA sequence that is 100% identical to a DNA sequence in the ZC3H12A gene (SEQ ID NO: 5) or the Zc3h12a gene (SEQ ID NO: 6).

[0529] In some embodiments, the at least one RC3H1-targeting zinc finger binding domain binds to a target DNA sequence that is at least 95%, 96%, 97%, 98%, or 99% identical to a DNA sequence defined by a set of genomic coordinates shown in Table 19 or Table 20 and the at least one ZC3H12A-targeting zinc finger binding domain binds to a target DNA sequence that is at least 95%, 96%, 97%, 98%, or 99% identical to a DNA sequence defined by a set of genomic coordinates shown in Table 11 or Table 12. In some embodiments, the at least one RC3H1-targeting zinc finger binding domain binds to a target DNA sequence that is 100% identical to a DNA sequence defined by a set of genomic coordinates shown in Table 19 or Table 20 and the at least one ZC3H12A-targeting zinc finger binding domain binds to a target DNA sequence that is 100% identical to a DNA sequence defined by a set of genomic coordinates shown in Table 11 or Table 12.

[0530] In some embodiments, the at least one RC3H1-targeting zinc finger binding domain binds to a target DNA sequence that is at least 95%, 96%, 97%, 98%, or 99% identical to one of SEQ ID NOs: 824-844 or 824-836 and the at least one ZC3H12A-targeting zinc finger binding domain binds to a target DNA sequence that is at least 95%, 96%, 97%, 98%, or 99% identical to one of SEQ ID NOs: 331-797 or 338-789. In some embodiments, the at least one RC3H1-targeting zinc finger binding domain binds to a target DNA sequence that is 100% identical to one of SEQ ID NOs: 824-844 or 824-836 and the at least one ZC3H12A-targeting zinc finger binding domain binds to a target DNA sequence that is 100% identical to one of SEQ ID NOs: 331-797 or 338-789.

[0531] In some embodiments, the protein-based gene-regulating system comprises at least two ZFPs, wherein at least one ZFP comprises a SOCS1-targeting zinc finger binding domain and at least one ZFP comprises a RC3H1-targeting zinc finger binding domain. In some embodiments, the at least one SOCS1-targeting zinc finger binding domain binds to a target DNA sequence that is at least 95%, 96%, 97%, 98%, or 99% identical to a DNA sequence in the SOCS1 gene (SEQ ID NO: 1) or the Socs1 gene (SEQ ID NO: 2) and the at least one RC3H1-targeting zinc finger binding domain binds to a target DNA sequence that is at least 95%, 96%, 97%, 98%, or 99% identical to a DNA sequence in the RC3H1 gene (SEQ ID NO: 9) or the Rc3h1 gene (SEQ ID NO: 10). In some embodiments, the at least one SOCS1-targeting zinc finger binding domain binds to a target DNA sequence that is 100% identical to a DNA sequence in the SOCS1 gene (SEQ ID NO: 1) or the Socs1 gene (SEQ ID NO: 2) and the at least one RC3H1-targeting zinc finger binding domain binds to a target DNA sequence that is 100% identical to a DNA sequence in the RC3H1 gene (SEQ ID NO: 9) or the Rc3h1 gene (SEQ ID NO: 10).

[0532] In some embodiments, the at least one SOCS1-targeting zinc finger binding domain binds to a target DNA sequence that is at least 95%, 96%, 97%, 98%, or 99% identical to a DNA sequence defined by a set of genomic coordinates shown in Table 4 or Table 5 and the at least one RC3H1-targeting zinc finger binding domain binds to a target DNA sequence that is at least 95%, 96%, 97%, 98%, or 99% identical to a DNA sequence defined by a set of genomic coordinates shown in Table 19 or Table 20. In some embodiments, the at least one SOCS1-targeting zinc finger binding domain binds to a target DNA sequence that is 100% identical to a DNA sequence defined by a set of genomic coordinates shown in Table 4 or Table 5 and the at least one RC3H1-targeting zinc finger binding domain binds to a target DNA sequence that is 100% identical to a DNA sequence defined by a set of genomic coordinates shown in Table 19 or Table 20.

[0533] In some embodiments, the protein-based gene-regulating system comprises at least two ZFPs, wherein at least one ZFP comprises a CBLB-targeting zinc finger binding domain and at least one ZFP comprises a RC3H1-targeting zinc finger binding domain. In some embodiments, the at least one CBLB-targeting zinc finger binding domain binds to a target DNA sequence that is at least 95%, 96%, 97%, 98%, or 99% identical to a DNA sequence in the CBLB gene (SEQ ID NO: 7) or the Cblb gene (SEQ ID NO: 8) and the at least one R C3H1-targeting zinc finger binding domain binds to a target DNA sequence that is at least 95%, 96%, 97%, 98%, or 99% identical to a DNA sequence in the RC3H1 gene (SEQ ID NO: 9) or the Rc3h1 gene (SEQ ID NO: 10). In some embodiments, the at least one CBLB-targeting zinc finger binding domain binds to a target DNA sequence that is 100% identical to a DNA sequence in the CBLB gene (SEQ ID NO: 7) or the Cblb gene (SEQ ID NO: 8) and the at least one RC3H1-targeting zinc finger binding domain binds to a target DNA sequence that is 100% identical to a DNA sequence in the RC3H1 gene (SEQ ID NO: 9) or the Rc3h1 gene (SEQ ID NO: 10).

[0534] In some embodiments, the at least one CBLB-targeting zinc finger binding domain binds to a target DNA sequence that is at least 95%, 96%, 97%, 98%, or 99% identical to a DNA sequence defined by a set of genomic coordinates shown in Table 17 or Table 18 and the at least one RC3H1-targeting zinc finger binding domain binds to a target DNA sequence that is at least 95%, 96%, 97%, 98%, or 99% identical to a DNA sequence defined by a set of genomic coordinates shown in Table 19 or Table 20. In some embodiments, the at least one CBLB-targeting zinc finger binding domain binds to a target DNA sequence that is 100% identical to a DNA sequence defined by a set of genomic coordinates shown in Table 17 or Table 18 and the at least one RC3H1-targeting zinc finger binding domain binds to a target DNA sequence that is 100% identical to a DNA sequence defined by a set of genomic coordinates shown in Table 19 or Table 20.

[0535] In some embodiments, the at least one CBLB-targeting zinc finger binding domain binds to a target DNA sequence that is at least 95%, 96%, 97%, 98%, or 99% identical to one of SEQ ID NOs: 798-823 or 798-808 and the at least one RC3H1-targeting zinc finger binding domain binds to a target DNA sequence that is at least 95%, 96%, 97%, 98%, or 99% identical to one of SEQ ID NOs: 824-844 or 824-836. In some embodiments, the at least one CBLB-targeting zinc finger binding domain binds to a target DNA sequence that is 100% identical to one of SEQ ID NOs: 798-823 or 798-808 and the at least one RC3H1-targeting zinc finger binding domain binds to a target DNA sequence that is 100% identical to one of SEQ ID NOs: 824-844 or 824-836.

[0536] In some embodiments, the protein-based gene-regulating system comprises at least two ZFPs, wherein at least one ZFP comprises a NFKBIA-targeting zinc finger binding domain and at least one ZFP comprises a PTPN2-targeting zinc finger binding domain. In some embodiments, the at least one NFKBIA-targeting zinc finger binding domain binds to a target DNA sequence that is at least 95%, 96%, 97%, 98%, or 99% identical to a DNA sequence in the NFKBIA gene (SEQ ID NO: 11) or the Nfkbia gene (SEQ ID NO: 12) and the at least one PTPN2-targeting zinc finger binding domain binds to a target DNA sequence that is at least 95%, 96%, 97%, 98%, or 99% identical to a DNA sequence in the PTPN2 gene (SEQ ID NO: 3) or the Ptpn2 gene (SEQ ID NO: 4). In some embodiments, the at least one NFKBIA-targeting zinc finger binding domain binds to a target DNA sequence that is 100% identical to a DNA sequence in the NFKBIA gene (SEQ ID NO: 11) or the Nfkbia gene (SEQ ID NO: 12) and the at least one PTPN2-targeting zinc finger binding domain binds to a target DNA sequence that is 100% identical to a DNA sequence in the PTPN2 gene (SEQ ID NO: 3) or the Ptpn2 gene (SEQ ID NO: 4).

[0537] In some embodiments, the at least one NFKBIA-targeting zinc finger binding domain binds to a target DNA sequence that is at least 95%, 96%, 97%, 98%, or 99% identical to a DNA sequence defined by a set of genomic coordinates shown in Table 21 or Table 22 and the at least one PTPN2-targeting zinc finger binding domain binds to a target DNA sequence that is at least 95%, 96%, 97%, 98%, or 99% identical to a DNA sequence defined by a set of genomic coordinates shown in Table 9 or Table 10. In some embodiments, the at least one NFKBIA-targeting zinc finger binding domain binds to a target DNA sequence that is 100% identical to a DNA sequence defined by a set of genomic coordinates shown in Table 21 or Table 22 and the at least one PTPN2-targeting zinc finger binding domain binds to a target DNA sequence that is 100% identical to a DNA sequence defined by a set of genomic coordinates shown in Table 9 or Table 10.

[0538] In some embodiments, the at least one NFKBIA-targeting zinc finger binding domain binds to a target DNA sequence that is at least 95%, 96%, 97%, 98%, or 99% identical to one of SEQ ID NOs: 845-875 or 845-856 and the at least one PTPN2-targeting zinc finger binding domain binds to a target DNA sequence that is at least 95%, 96%, 97%, 98%, or 99% identical to one of SEQ ID NOs: 201-327 or 201-314. In some embodiments, the at least one NFKBIA-targeting zinc finger binding domain binds to a target DNA sequence that is 100% identical to one of SEQ ID NOs: 845-875 or 845-856 and the at least one PTPN2-targeting zinc finger binding domain binds to a target DNA sequence that is 100% identical to one of SEQ ID NOs: 201-327 or 201-314.

[0539] In some embodiments, the protein-based gene-regulating system comprises at least two ZFPs, wherein at least one ZFP comprises a NFKBIA-targeting zinc finger binding domain and at least one ZFP comprises a ZC3H12A-targeting zinc finger binding domain. In some embodiments, the at least one NFKBIA-targeting zinc finger binding domain binds to a target DNA sequence that is at least 95%, 96%, 97%, 98%, or 99% identical to a DNA sequence in the NFKBIA gene (SEQ ID NO: 11) or the NFKBIA gene (SEQ ID NO: 12) and the at least one ZC3H12A-targeting zinc finger binding domain binds to a target DNA sequence that is at least 95%, 96%, 97%, 98%, or 99% identical to a DNA sequence in the ZC3H12A gene (SEQ ID NO: 5) or the Zc3h12a gene (SEQ ID NO: 6). In some embodiments, the at least one NFKBIA-targeting zinc finger binding domain binds to a target DNA sequence that is 100% identical to a DNA sequence in the NFKBIA gene (SEQ ID NO: 11) or the Nfkbia gene (SEQ ID NO: 12) and the at least one ZC3H12A-targeting zinc finger binding domain binds to a target DNA sequence that is 100% identical to a DNA sequence in the ZC3H12A gene (SEQ ID NO: 5) or the Zc3h12a gene (SEQ ID NO: 6).

[0540] In some embodiments, the at least one NFKBIA-targeting zinc finger binding domain binds to a target DNA sequence that is at least 95%, 96%, 97%, 98%, or 99% identical to a DNA sequence defined by a set of genomic coordinates shown in Table 21 or Table 22 and the at least one ZC3H12A-targeting zinc finger binding domain binds to a target DNA sequence that is at least 95%, 96%, 97%, 98%, or 99% identical to a DNA sequence defined by a set of genomic coordinates shown in Table 11 or Table 12. In some embodiments, the at least one NFKBIA-targeting zinc finger binding domain binds to a target DNA sequence that is 100% identical to a DNA sequence defined by a set of genomic coordinates shown in Table 21 or Table 22 and the at least one ZC3H12A-targeting zinc finger binding domain binds to a target DNA sequence that is 100% identical to a DNA sequence defined by a set of genomic coordinates shown in Table 11 or Table 12.

[0541] In some embodiments, the at least one NFKBIA-targeting zinc finger binding domain binds to a target DNA sequence that is at least 95%, 96%, 97%, 98%, or 99% identical to one of SEQ ID NOs: 845-875 or 845-856 and the at least one ZC3H12A-targeting zinc finger binding domain binds to a target DNA sequence that is at least 95%, 96%, 97%, 98%, or 99% identical to one of SEQ ID NOs: 331-797 or 338-789. In some embodiments, the at least one NFKBIA-targeting zinc finger binding domain binds to a target DNA sequence that is 100% identical to one of SEQ ID NOs: 845-875 or 845-856 and the at least one ZC3H12A-targeting zinc finger binding domain binds to a target DNA sequence that is 100% identical to one of SEQ ID NOs: 331-797 or 338-789.

[0542] In some embodiments, the protein-based gene-regulating system comprises at least two ZFPs, wherein at least one ZFP comprises a SOCS1-targeting zinc finger binding domain and at least one ZFP comprises a NFKBIA-targeting zinc finger binding domain. In some embodiments, the at least one SOCS1-targeting zinc finger binding domain binds to a target DNA sequence that is at least 95%, 96%, 97%, 98%, or 99% identical to a DNA sequence in the SOCS1 gene (SEQ ID NO: 1) or the Socs1 gene (SEQ ID NO: 2) and the at least one NFKBIA-targeting zinc finger binding domain binds to a target DNA sequence that is at least 95%, 96%, 97%, 98%, or 99% identical to a DNA sequence in the NFKBIA gene (SEQ ID NO: 11) or the Nfkbia gene (SEQ ID NO: 12). In some embodiments, the at least one SOCS1-targeting zinc finger binding domain binds to a target DNA sequence that is 100% identical to a DNA sequence in the SOCS1 gene (SEQ ID NO: 1) or the Socs1 gene (SEQ ID NO: 2) and the at least one NFKBIA-targeting zinc finger binding domain binds to a target DNA sequence that is 100% identical to a DNA sequence in the NFKBIA gene (SEQ ID NO: 11) or the Nfkbia gene (SEQ ID NO: 12).

[0543] In some embodiments, the at least one SOCS1-targeting zinc finger binding domain binds to a target DNA sequence that is at least 95%, 96%, 97%, 98%, or 99% identical to a DNA sequence defined by a set of genomic coordinates shown in Table 4 or Table 5 and the at least one NFKBIA-targeting zinc finger binding domain binds to a target DNA sequence that is at least 95%, 96%, 97%, 98%, or 99% identical to a DNA sequence defined by a set of genomic coordinates shown in Table 21 or Table 22. In some embodiments, the at least one SOCS1-targeting zinc finger binding domain binds to a target DNA sequence that is 100% identical to a DNA sequence defined by a set of genomic coordinates shown in Table 4 or Table 5 and the at least one NFKBIA-targeting zinc finger binding domain binds to a target DNA sequence that is 100% identical to a DNA sequence defined by a set of genomic coordinates shown in Table 21 or Table 22.

[0544] In some embodiments, the at least one SOCS1-targeting zinc finger binding domain binds to a target DNA sequence that is at least 95%, 96%, 97%, 98%, or 99% identical to one of SEQ ID NOs: 23-200 or 56-187 and the at least one NFKBIA-targeting zinc finger binding domain binds to a target DNA sequence that is at least 95%, 96%, 97%, 98%, or 99% identical to one of SEQ ID NOs: 845-875 or 845-856. In some embodiments, the at least one SOCS1-targeting zinc finger binding domain binds to a target DNA sequence that is 100% identical to one of SEQ ID NOs: 23-200 or 56-187 and the at least one NFKBIA-targeting zinc finger binding domain binds to a target DNA sequence that is 100% identical to one of SEQ ID NOs: 845-875 or 845-856.

[0545] In some embodiments, the protein-based gene-regulating system comprises at least two ZFPs, wherein at least one ZFP comprises a CBLB-targeting zinc finger binding domain and at least one ZFP comprises a NFKBIA-targeting zinc finger binding domain. In some embodiments, the at least one CBLB-targeting zinc finger binding domain binds to a target DNA sequence that is at least 95%, 96%, 97%, 98%, or 99% identical to a DNA sequence in the CBLB gene (SEQ ID NO: 7) or the Cblb gene (SEQ ID NO: 8) and the at least one NFKBIA-targeting zinc finger binding domain binds to a target DNA sequence that is at least 95%, 96%, 97%, 98%, or 99% identical to a DNA sequence in the NFKBIA gene (SEQ ID NO: 11) or the Nfkbia gene (SEQ ID NO: 12). In some embodiments, the at least one CBLB-targeting zinc finger binding domain binds to a target DNA sequence that is 100% identical to a DNA sequence in the CBLB gene (SEQ ID NO: 7) or the Cblb gene (SEQ ID NO: 8) and the at least one NFKBIA-targeting zinc finger binding domain binds to a target DNA sequence that is 100% identical to a DNA sequence in the NFKBIA gene (SEQ ID NO: 11) or the Nfkbia gene (SEQ ID NO: 12).

[0546] In some embodiments, the at least one CBLB-targeting zinc finger binding domain binds to a target DNA sequence that is at least 95%, 96%, 97%, 98%, or 99% identical to a DNA sequence defined by a set of genomic coordinates shown in Table 17 or Table 18 and the at least one NFKBIA-targeting zinc finger binding domain binds to a target DNA sequence that is at least 95%, 96%, 97%, 98%, or 99% identical to a DNA sequence defined by a set of genomic coordinates shown in Table 21 or Table 22. In some embodiments, the at least one CBLB-targeting zinc finger binding domain binds to a target DNA sequence that is 100% identical to a DNA sequence defined by a set of genomic coordinates shown in Table 17 or Table 18 and the at least one NFKBIA-targeting zinc finger binding domain binds to a target DNA sequence that is 100% identical to a DNA sequence defined by a set of genomic coordinates shown in Table 21 or Table 22.

[0547] In some embodiments, the at least one CBLB-targeting zinc finger binding domain binds to a target DNA sequence that is at least 95%, 96%, 97%, 98%, or 99% identical to one of SEQ ID NOs: 798-823 or 798-808 and the at least one NFKBIA-targeting zinc finger binding domain binds to a target DNA sequence that is at least 95%, 96%, 97%, 98%, or 99% identical to one of SEQ ID NOs: 845-875 or 845-856. In some embodiments, the at least one CBLB-targeting zinc finger binding domain binds to a target DNA sequence that is 100% identical to one of SEQ ID NOs: 798-823 or 798-808 and the at least one NFKBIA-targeting zinc finger binding domain binds to a target DNA sequence that is 100% identical to one of SEQ ID NOs: 845-875 or 845-856.

[0548] In some embodiments, the protein-based gene-regulating system comprises at least two ZFPs, wherein at least one ZFP comprises a RC3H1-targeting zinc finger binding domain and at least one ZFP comprises a NFKBIA-targeting zinc finger binding domain. In some embodiments, the at least one RC3H1-targeting zinc finger binding domain binds to a target DNA sequence that is at least 95%, 96%, 97%, 98%, or 99% identical to a DNA sequence in the RC3H1 gene (SEQ ID NO: 9) or the Rc3h1 gene (SEQ ID NO: 10) and the at least one NFKBIA-targeting zinc finger binding domain binds to a target DNA sequence that is at least 95%, 96%, 97%, 98%, or 99% identical to a DNA sequence in the NFKBIA gene (SEQ ID NO: 11) or the Nfkbia gene (SEQ ID NO: 12). In some embodiments, the at least one RC3H1-targeting zinc finger binding domain binds to a target DNA sequence that is 100% identical to a DNA sequence in the RC3H1 gene (SEQ ID NO: 9) or the Rc3h1 gene (SEQ ID NO: 10) and the at least one NFKBIA-targeting zinc finger binding domain binds to a target DNA sequence that is 100% identical to a DNA sequence in the NFKBIA gene (SEQ ID NO: 11) or the Nfkbia gene (SEQ ID NO: 12).

[0549] In some embodiments, the at least one RC3H1-targeting zinc finger binding domain binds to a target DNA sequence that is at least 95%, 96%, 97%, 98%, or 99% identical to a DNA sequence defined by a set of genomic coordinates shown in Table 19 or Table 20 and the at least one NFKBIA-targeting zinc finger binding domain binds to a target DNA sequence that is at least 95%, 96%, 97%, 98%, or 99% identical to a DNA sequence defined by a set of genomic coordinates shown in Table 21 or Table 22. In some embodiments, the at least one RC3H1-targeting zinc finger binding domain binds to a target DNA sequence that is 100% identical to a DNA sequence defined by a set of genomic coordinates shown in Table 19 or Table 20 and the at least one NFKBIA-targeting zinc finger binding domain binds to a target DNA sequence that is 100% identical to a DNA sequence defined by a set of genomic coordinates shown in Table 21 or Table 22.

[0550] In some embodiments, the at least one RC3H1-targeting zinc finger binding domain binds to a target DNA sequence that is at least 95%, 96%, 97%, 98%, or 99% identical to one of SEQ ID NOs: 824-844 or 824-836 and the at least one NFKBIA-targeting zinc finger binding domain binds to a target DNA sequence that is at least 95%, 96%, 97%, 98%, or 99% identical to one of SEQ ID NOs: 845-875 or 845-856. In some embodiments, the at least one RC3H1-targeting zinc finger binding domain binds to a target DNA sequence that is 100% identical to one of SEQ ID NOs: 824-844 or 824-836 and the at least one NFKBIA-targeting zinc finger binding domain binds to a target DNA sequence that is 100% identical to one of SEQ ID NOs: 845-875 or 845-856.

[0551] The enzymatic domain portion of the zinc finger fusion proteins can be obtained from any endo- or exonuclease. Exemplary endonucleases from which an enzymatic domain can be derived include, but are not limited to, restriction endonucleases and homing endonucleases. See, for example, 2002-2003 Catalogue, New England Biolabs, Beverly, Mass.; and Belfort et al. (1997) Nucleic Acids Res. 25:3379-3388. Additional enzymes which cleave DNA are known (e.g., 51 Nuclease; mung bean nuclease; pancreatic DNaseI; micrococcal nuclease; yeast HO endonuclease; see also Linn et al. (eds.) Nucleases, Cold Spring Harbor Laboratory Press, 1993). One or more of these enzymes (or functional fragments thereof) can be used as a source of cleavage domains.

[0552] Exemplary restriction endonucleases (restriction enzymes) suitable for use as an enzymatic domain of the ZFPs described herein are present in many species and are capable of sequence-specific binding to DNA (at a recognition site), and cleaving DNA at or near the site of binding. Certain restriction enzymes (e.g., Type IIS) cleave DNA at sites removed from the recognition site and have separable binding and cleavage domains. For example, the Type IIS enzyme FokI catalyzes double-stranded cleavage of DNA, at 9 nucleotides from its recognition site on one strand and 13 nucleotides from its recognition site on the other. See, for example, U.S. Pat. Nos. 5,356,802; 5,436,150 and 5,487,994; as well as Li et al. (1992) Proc. Natl. Acad. Sci. USA 89:4275-4279; Li et al. (1993) Proc. Natl. Acad. Sci. USA 90:2764-2768; Kim et al. (1994a) Proc. Natl. Acad. Sci. USA 91:883-887; Kim et al. (1994b) J. Biol. Chem. 269:31,978-31,982. Thus, in one embodiment, fusion proteins comprise the enzymatic domain from at least one Type IIS restriction enzyme and one or more zinc finger binding domains.

[0553] An exemplary Type IIS restriction enzyme, whose cleavage domain is separable from the binding domain, is FokI. This particular enzyme is active as a dimer. Bitinaite et al. (1998) Proc. Natl. Acad. Sci. USA 95: 10,570-10,575. Thus, for targeted double-stranded DNA cleavage using zinc finger-FokI fusions, two fusion proteins, each comprising a FokI enzymatic domain, can be used to reconstitute a catalytically active cleavage domain. Alternatively, a single polypeptide molecule containing a zinc finger binding domain and two FokI enzymatic domains can also be used. Exemplary ZFPs comprising FokI enzymatic domains are described in U.S. Pat. No. 9,782,437.

### TALEN Systems

[0554] In some embodiments, the present disclosure provides TALEN gene-regulating systems comprising one, two or more TALEN fusion proteins capable of reducing the expression and/or function of at least two endogenous genes selected from SOCS1, PTPN2, ZC3H12A, CBLB, RC3H1 and NFKBIA. In some embodiments, the present disclosure provides modified TILs manufactured by the methods described herein comprising such gene-regulating systems. TALEN-based systems comprise a TALEN fusion protein comprising a TAL effector DNA binding domain and an enzymatic domain. They are made by fusing a TAL effector DNA-binding domain to a DNA cleavage domain (a nuclease which cuts DNA strands). The FokI restriction enzyme described above is an exemplary enzymatic domain suitable for use in TALEN-based gene-regulating systems.

[0555] TAL effectors are proteins that are secreted by Xanthomonas bacteria via their type III secretion system when they infect plants. The DNA binding domain contains a repeated, highly conserved, 33-34 amino acid sequence with divergent 12th and 13th amino acids. These two positions, referred to as the Repeat Variable Diresidue (RVD), are highly variable and strongly correlated with specific nucleotide recognition. Therefore, the TAL effector domains can be engineered to bind specific target DNA sequences by selecting a combination of repeat segments containing the appropriate RVDs. The nucleic acid specificity for RVD combinations is as follows: HD targets cytosine, NI targets adenine, NG targets thymine, and NN targets guanine (though, in some embodiments, NN can also bind adenine with lower specificity).

[0556] Methods and compositions for assembling the TAL-effector repeats are known in the art. See e.g., Cermak et al, Nucleic Acids Research, 39:12, 2011, e82. Plasmids for constructions of the TAL-effector repeats are commercially available from Addgene.

[0557] In some embodiments, the protein-based gene-regulating system comprises at least one TALEN fusion protein that comprises a SOCS1-targeting TAL effector domain. In some embodiments, the at least one SOCS1-targeting TAL effector domain binds to a target DNA sequence that is at least 95%, 96%, 97%, 98%, or 99% identical to a target DNA sequence in the SOCS1 gene (SEQ ID NO: 1) or the Socs1 gene (SEQ ID NO: 2). In some embodiments, the at least one SOCS1-targeting TAL effector domain binds to a target DNA sequence that is 100% identical to a target DNA sequence in the SOCS1 gene (SEQ ID NO: 1) or the Socs1 gene (SEQ ID NO: 2).

[0558] In some embodiments, the at least one SOCS1-targeting TAL effector domain binds to a target DNA sequence that is at least 95%, 96%, 97%, 98%, or 99% identical to a DNA sequence defined by a set of genomic coordinates shown in Table 4 or Table 5. In some embodiments, the at least one SOCS1-targeting TAL effector domain binds to a target DNA sequence that is 100% identical to a DNA sequence defined by a set of genomic coordinates shown in Table 4 or Table 5. In some embodiments, the at least one SOCS1-targeting TAL effector domain binds to a target DNA sequence that is at least 90%, 95%, 96%, 97%, 98%, or 99% identical to one of SEQ ID NOs: 23-200 or 56-187. In some embodiments, the at least one SOCS1-targeting TAL effector domain binds to a target DNA sequence that is 100% identical to one of SEQ ID NOs: 23-200 or 56-187.

[0559] In some embodiments, the protein-based gene-regulating system comprises at least one TALEN fusion protein that comprises a PTPN2-targeting TAL effector domain. In some embodiments, the at least one PTPN2-targeting TAL effector domain binds to a target DNA sequence that is at least 95%, 96%, 97%, 98%, or 99% identical to a target DNA sequence in the PTPN2 gene (SEQ ID NO: 3) or the Ptpn2 gene (SEQ ID NO: 4). In some embodiments, the at least one PTPN2-targeting TAL effector domain binds to a target DNA sequence that is 100% identical to a target DNA sequence in the PTPN2 gene (SEQ ID NO: 3) or the Ptpn2 gene (SEQ ID NO: 4).

[0560] In some embodiments, the at least one PTPN2-targeting TAL effector domain binds to a target DNA sequence that is at least 95%, 96%, 97%, 98%, or 99% identical to a DNA sequence defined by a set of genomic coordinates shown in Table 9 or Table 10. In some embodiments, the at least one PTPN2-targeting TAL effector domain binds to a target DNA sequence that is 100% identical to a DNA sequence defined by a set of genomic coordinates shown in Table 9 or Table 10. In some embodiments, the at least one PTPN2-targeting TAL effector domain binds to a target DNA sequence that is at least 95%, 96%, 97%, 98%, or 99% identical to one of SEQ ID NOs: 201-327 or 201-314. In some embodiments, the at least one PTPN2-targeting TAL effector domain binds to a target DNA sequence that is 100% identical to one of SEQ ID NOs: 201-327 or 201-314.

[0561] In some embodiments, the protein-based gene-regulating system comprises at least one TALEN fusion protein that comprises a ZC3H12A-targeting TAL effector domain. In some embodiments, the at least one ZC3H12A-targeting TAL effector domain binds to a target DNA sequence that is at least 95%, 96%, 97%, 98%, or 99% identical to a target DNA sequence in the ZC3H12A gene (SEQ ID NO: 5) or the Zc3h12a gene (SEQ ID NO: 6). In some embodiments, the at least one ZC3H12A-targeting TAL effector domain binds to a target DNA sequence that is 100% identical to a target DNA sequence in the ZC3H12A gene (SEQ ID NO: 5) or the Zc3h12a gene (SEQ ID NO: 6).

[0562] In some embodiments, the at least one ZC3H12A-targeting TAL effector domain binds to a target DNA sequence that is at least 95%, 96%, 97%, 98%, or 99% identical to a DNA sequence defined by a set of genomic coordinates shown in Table 11 or Table 12. In some embodiments, the at least one ZC3H12A-targeting TAL effector domain binds to a target DNA sequence that is 100% identical to a DNA sequence defined by a set of genomic coordinates shown in Table 11 or Table 12. In some embodiments, the at least one ZC3H12A-targeting TAL effector domain binds to a target DNA sequence that is at least 95%, 96%, 97%, 98%, or 99% identical to one of SEQ ID NOs: 331-797 or 338-789. In some embodiments, the at least one ZC3H12A-targeting TAL effector domain binds to a target DNA sequence that is 100% identical to one of SEQ ID NOs: 331-797 or 338-789.

[0563] In some embodiments, the protein-based gene-regulating system comprises at least one TALEN fusion protein that comprises a CBLB-targeting TAL effector domain. In some embodiments, the at least one CBLB-targeting TAL effector domain binds to a target DNA sequence that is at least 95%, 96%, 97%, 98%, or 99% identical to a target DNA sequence in the CBLB gene (SEQ ID NO: 7) or the Cblb gene (SEQ ID NO: 8). In some embodiments, the at least one CBLB-targeting TAL effector domain binds to a target DNA sequence that is 100% identical to a target DNA sequence in the CBLB gene (SEQ ID NO: 7) or the Cblb gene (SEQ ID NO: 8).

[0564] In some embodiments, the at least one CBLB-targeting TAL effector domain binds to a target DNA sequence that is at least 95%, 96%, 97%, 98%, or 99% identical to a DNA sequence defined by a set of genomic coordinates shown in Table 17 or Table 18. In some embodiments, the at least one CBLB-targeting TAL effector domain binds to a target DNA sequence that is 100% identical to a DNA sequence defined by a set of genomic coordinates shown in Table 17 or Table 18. In some embodiments, the at least one CBLB-targeting TAL effector domain binds to a target DNA sequence that is at least 95%, 96%, 97%, 98%, or 99% identical to one of SEQ ID NOs: 798-823 or 798-808. In some embodiments, the at least one CBLB-targeting TAL effector domain binds to a target DNA sequence that is 100% identical to one of SEQ ID NOs: 798-823 or 798-808.

[0565] In some embodiments, the protein-based gene-regulating system comprises at least one TALEN fusion protein that comprises a RC3H1-targeting TAL effector domain. In some embodiments, the at least one RC3H1-targeting TAL effector domain binds to a target DNA sequence that is at least 95%, 96%, 97%, 98%, or 99% identical to a target DNA sequence in the RC3H1 gene (SEQ ID NO: 9) or the Rc3h1 gene (SEQ ID NO: 10). In some embodiments, the at least one RC3H1-targeting TAL effector domain binds to a target DNA sequence that is 100% identical to a target DNA sequence in the RC3H1 gene (SEQ ID NO: 9) or the Rc3h1 gene (SEQ ID NO: 10).

[0566] In some embodiments, the at least one RC3H1-targeting TAL effector domain binds to a target DNA sequence that is at least 95%, 96%, 97%, 98%, or 99% identical to a DNA sequence defined by a set of genomic coordinates shown in Table 7 or Table 8. In some embodiments, the at least one RC3H1-targeting TAL effector domain binds to a target DNA sequence that is 100% identical to a DNA sequence defined by a set of genomic coordinates shown in Table 19 or Table 20. In some embodiments, the at least one RC3H1-targeting TAL effector domain binds to a target DNA sequence that is at least 95%, 96%, 97%, 98%, or 99% identical to one of SEQ ID NOs: 824-844 or 824-836. In some embodiments, the at least one RC3H1-targeting TAL effector domain binds to a target DNA sequence that is 100% identical to one of SEQ ID NOs: 824-844 or 824-836.

[0567] In some embodiments, the protein-based gene-regulating system comprises at least one TALEN fusion protein that comprises a NFKBIA-targeting TAL effector domain. In some embodiments, the at least one NFKBIA-targeting TAL effector domain binds to a target DNA sequence that is at least 95%, 96%, 97%, 98%, or 99% identical to a target DNA sequence in the NFKBIA gene (SEQ ID NO: 11) or the Nfkbia gene (SEQ ID NO: 12). In some embodiments, the at least one NFKBIA-targeting TAL effector domain binds to a target DNA sequence that is 100% identical to a target DNA sequence in the NFKBIA gene (SEQ ID NO: 11) or the Nfkbia gene (SEQ ID NO: 12).

[0568] In some embodiments, the at least one NFKBIA-targeting TAL effector domain binds to a target DNA sequence that is at least 95%, 96%, 97%, 98%, or 99% identical to a DNA sequence defined by a set of genomic coordinates shown in Table 21 or Table 22. In some embodiments, the at least one NFKBIA-targeting TAL effector domain binds to a target DNA sequence that is 100% identical to a DNA sequence defined by a set of genomic coordinates shown in Table 21 or Table 22. In some embodiments, the at least one NFKBIA-targeting TAL effector domain binds to a target DNA sequence that is at least 95%, 96%, 97%, 98%, or 99% identical to one of SEQ ID NOs: 845-875 or 845-856. In some embodiments, the at least one NFKBIA-targeting TAL effector domain binds to a target DNA sequence that is 100% identical to one of SEQ ID NOs: 845-875 or 845-856.

[0569] In some embodiments, the protein-based gene-regulating system comprises at least two Talen fusion proteins, wherein at least one Talen fusion protein comprises a SOCS1-targeting TAL effector domain and at least one Talen fusion protein comprises a PTPN2-targeting TAL effector domain. In some embodiments, the at least one SOCS1-targeting TAL effector domain binds to a target DNA sequence that is at least 95%, 96%, 97%, 98%, or 99% identical to a DNA sequence in the SOCS1 gene (SEQ ID NO: 1) or the Socs1 gene (SEQ ID NO: 2) and the at least one PTPN2-targeting TAL effector domain binds to a target DNA sequence that is at least 95%, 96%, 97%, 98%, or 99% identical to a DNA sequence the PTPN2 gene (SEQ ID NO: 3) or the Ptpn2 gene (SEQ ID NO: 4). In some embodiments, the at least one SOCS1-targeting TAL effector domain binds to a target DNA sequence that is 100% identical to a DNA sequence in the SOCS1 gene (SEQ ID NO: 1) or the Socs1 gene (SEQ ID NO: 2) and the at least one PTPN2-targeting TAL effector domain binds to a target DNA sequence that is 100% identical to a DNA sequence in the PTPN2 gene (SEQ ID NO: 3) or the Ptpn2 gene (SEQ ID NO: 4).

[0570] In some embodiments, the at least one SOCS1-targeting TAL effector domain binds to a target DNA sequence that is at least 95%, 96%, 97%, 98%, or 99% identical to a DNA sequence defined by a set of genomic coordinates shown in Table 4 or Table 5 and the at least one PTPN2-targeting TAL effector domain binds to a target DNA sequence that is at least 95%, 96%, 97%, 98%, or 99% identical to a DNA sequence defined by a set of genomic coordinates shown in Table 9 or Table 10. In some embodiments, the at least one SOCS1-targeting TAL effector domain binds to a target DNA sequence that is 100% identical to a DNA sequence defined by a set of genomic coordinates shown in Table 4 or Table 5 and the at least one PTPN2-targeting TAL effector domain binds to a target DNA sequence that is 100% identical to a DNA sequence defined by a set of genomic coordinates shown in Table 9 or Table 10.

[0571] In some embodiments, the at least one SOCS1-targeting TAL effector domain binds to a target DNA sequence that is at least 95%, 96%, 97%, 98%, or 99% identical to one of SEQ ID NOs: 23-200 or 56-187 and the at least one PTPN2-targeting TAL effector domain binds to a target DNA sequence that is at least 95%, 96%, 97%, 98%, or 99% identical to one of SEQ ID NOs: 201-327 or 201-314. In some embodiments, the at least one SOCS1-targeting TAL effector domain binds to a target DNA sequence that is 100% identical to one of SEQ ID NOs: 23-200 or 56-187 and the at least one PTPN2-targeting TAL effector domain binds to a target DNA sequence that is 100% identical to one of SEQ ID NOs: 201-327 or 201-314.

[0572] In some embodiments, the protein-based gene-regulating system comprises at least two Talen fusion proteins, wherein at least one Talen fusion protein comprises a SOCS1-targeting TAL effector domain and at least one Talen fusion protein comprises a ZC3H12A-targeting TAL effector domain. In some embodiments, the at least one SOCS1-targeting TAL effector domain binds to a target DNA sequence that is at least 95%, 96%, 97%, 98%, or 99% identical to a DNA sequence in the SOCS1 gene (SEQ ID NO: 1) or the Socs1 gene (SEQ ID NO: 2) and the at least one ZC3H12A-targeting TAL effector domain binds to a target DNA sequence that is at least 95%, 96%, 97%, 98%, or 99% identical to a DNA sequence in the ZC3H12A gene (SEQ ID NO: 5) or the Zc3h12a gene (SEQ ID NO: 6). In some embodiments, the at least one SOCS1-targeting TAL effector domain binds to a target DNA sequence that is 100% identical to a DNA sequence in the SOCS1 gene (SEQ ID NO: 1) or the Socs1 gene (SEQ ID NO: 2) and the at least one ZC3H12A-targeting TAL effector domain binds to a target DNA sequence that is 100% identical to a DNA sequence in the ZC3H12A gene (SEQ ID NO: 5) or the Zc3h12a gene (SEQ ID NO: 6).

[0573] In some embodiments, the at least one SOCS1-targeting TAL effector domain binds to a target DNA sequence that is at least 95%, 96%, 97%, 98%, or 99% identical to a DNA sequence defined by a set of genomic coordinates shown in Table 4 or Table 5 and the at least one ZC3H12A-targeting TAL effector domain binds to a target DNA sequence that is at least 95%, 96%, 97%, 98%, or 99% identical to a DNA sequence defined by a set of genomic coordinates shown in Table 11 or Table 12. In some embodiments, the at least one SOCS1-targeting TAL effector domain binds to a target DNA sequence that is 100% identical to a DNA sequence defined by a set of genomic coordinates shown in Table 4 or Table 5 and the at least one ZC3H12A-targeting TAL effector domain binds to a target DNA sequence that is 100% identical to a DNA sequence defined by a set of genomic coordinates shown in Table 11 or Table 12.

[0574] In some embodiments, the at least one SOCS1-targeting TAL effector domain binds to a target DNA sequence that is at least 95%, 96%, 97%, 98%, or 99% identical to one of SEQ ID NOs: 23-200 or 56-187 and the at least one ZC3H12A-targeting TAL effector domain binds to a target DNA sequence that is at least 95%, 96%, 97%, 98%, or 99% identical to one of SEQ ID NOs: 331-797 or 338-789. In some embodiments, the at least one SOCS1-targeting TAL effector domain binds to a target DNA sequence that is 100% identical to one of SEQ ID NOs: 23-200 or 56-187 and the at least one ZC3H12A-targeting TAL effector domain binds to a target DNA sequence that is 100% identical to one of SEQ ID NOs: 331-797 or 338-789.

[0575] In some embodiments, the protein-based gene-regulating system comprises at least two Talen fusion proteins, wherein at least one Talen fusion protein comprises a PTPN2-targeting TAL effector domain and at least one Talen fusion protein comprises a ZC3H12A-targeting TAL effector domain. In some embodiments, the at least one PTPN2-targeting TAL effector domain binds to a target DNA sequence that is at least 95%, 96%, 97%, 98%, or 99% identical to a DNA sequence in the PTPN2 gene (SEQ ID NO: 3) or the Ptpn2 gene (SEQ ID NO: 4) and the at least one ZC3H12A-targeting TAL effector domain binds to a target DNA sequence that is at least 95%, 96%, 97%, 98%, or 99% identical to a DNA sequence in the ZC3H12A gene (SEQ ID NO: 5) or the Zc3h12a gene (SEQ ID NO: 6). In some embodiments, the at least one PTPN2-targeting TAL effector domain binds to a target DNA sequence that is 100% identical to a DNA sequence in the PTPN2 gene (SEQ ID NO: 3) or the Ptpn2 gene (SEQ ID NO: 4) and the at least one ZC3H12A-targeting TAL effector domain binds to a target DNA sequence that is 100% identical to a DNA sequence in the ZC3H12A gene (SEQ ID NO: 5) or the Zc3h12a gene (SEQ ID NO: 6).

[0576] In some embodiments, the at least one PTPN2-targeting TAL effector domain binds to a target DNA sequence that is at least 95%, 96%, 97%, 98%, or 99% identical to a DNA sequence defined by a set of genomic coordinates shown in Table 9 or Table 10 and the at least one ZC3H12A-targeting TAL effector domain binds to a target DNA sequence that is at least 95%, 96%, 97%, 98%, or 99% identical to a DNA sequence defined by a set of genomic coordinates shown in Table 11 or Table 12. In some embodiments, the at least one PTPN2-targeting TAL effector domain binds to a target DNA sequence that is 100% identical to a DNA sequence defined by a set of genomic coordinates shown in Table 9 or Table 10 and the at least one ZC3H12A-targeting TAL effector domain binds to a target DNA sequence that is 100% identical to a DNA sequence defined by a set of genomic coordinates shown in Table 11 or Table 12.

[0577] In some embodiments, the at least one PTPN2-targeting TAL effector domain binds to a target DNA sequence that is at least 95%, 96%, 97%, 98%, or 99% identical to one of SEQ ID NOs: 201-327 or 201-314 and the at least one ZC3H12A-targeting TAL effector domain binds to a target DNA sequence that is at least 95%, 96%, 97%, 98%, or 99% identical to one of SEQ ID NOs: 331-797 or 338-789. In some embodiments, the at least one PTPN2-targeting TAL effector domain binds to a target DNA sequence that is 100% identical to one of SEQ ID NOs: 201-327 or 201-314 and the at least one ZC3H12A-targeting TAL effector domain binds to a target DNA sequence that is 100% identical to one of SEQ ID NOs: 331-797 or 338-789.

[0578] In some embodiments, the protein-based gene-regulating system comprises at least two Talen fusion proteins, wherein at least one Talen fusion protein comprises a CBLB-targeting TAL effector domain and at least one Talen fusion protein comprises a PTPN2-targeting TAL effector domain. In some embodiments, the at least one CBLB-targeting TAL effector domain binds to a target DNA sequence that is at least 95%, 96%, 97%, 98%, or 99% identical to a DNA sequence in the CBLB gene (SEQ ID NO: 7) or the Cblb gene (SEQ ID NO: 8) and the at least one PTPN2-targeting TAL effector domain binds to a target DNA sequence that is at least 95%, 96%, 97%, 98%, or 99% identical to a DNA sequence in the PTPN2 gene (SEQ ID NO: 3) or the Ptpn2 gene (SEQ ID NO: 4). In some embodiments, the at least one CBLB-targeting TAL effector domain binds to a target DNA sequence that is 100% identical to a DNA sequence in the CBLB gene (SEQ ID NO: 7) or the Cblb gene (SEQ ID NO: 8) and the at least one PTPN2-targeting TAL effector domain binds to a target DNA sequence that is 100% identical to a DNA sequence in the PTPN2 gene (SEQ ID NO: 3) or the Ptpn2 gene (SEQ ID NO: 4).

[0579] In some embodiments, the at least one CBLB-targeting TAL effector domain binds to a target DNA sequence that is at least 95%, 96%, 97%, 98%, or 99% identical to a DNA sequence defined by a set of genomic coordinates shown in Table 17 or Table 18 and the at least one PTPN2-targeting TAL effector domain binds to a target DNA sequence that is at least 95%, 96%, 97%, 98%, or 99% identical to a DNA sequence defined by a set of genomic coordinates shown in Table 9 or Table 10. In some embodiments, the at least one CBLB-targeting TAL effector domain binds to a target DNA sequence that is 100% identical to a DNA sequence defined by a set of genomic coordinates shown in Table 17 or Table 18 and the at least one PTPN2-targeting TAL effector domain binds to a target DNA sequence that is 100% identical to a DNA sequence defined by a set of genomic coordinates shown in Table 9 or Table 10.

[0580] In some embodiments, the at least one CBLB-targeting TAL effector domain binds to a target DNA sequence that is at least 95%, 96%, 97%, 98%, or 99% identical to one of SEQ ID NOs: 798-823 or 798-808 and the at least one PTPN2-targeting TAL effector domain binds to a target DNA sequence that is at least 95%, 96%, 97%, 98%, or 99% identical to one of SEQ ID NOs: 201-327 or 201-314. In some embodiments, the at least one CBLB-targeting TAL effector domain binds to a target DNA sequence that is 100% identical to one of SEQ ID NOs: 798-823 or 798-808 and the at least one PTPN2-targeting TAL effector domain binds to a target DNA sequence that is 100% identical to one of SEQ ID NOs: 201-327 or 201-314.

[0581] In some embodiments, the protein-based gene-regulating system comprises at least two Talen fusion proteins, wherein at least one Talen fusion protein comprises a CBLB-targeting TAL effector domain and at least one Talen fusion protein comprises a ZC3H12A-targeting TAL effector domain. In some embodiments, the at least one CBLB-targeting TAL effector domain binds to a target DNA sequence that is at least 95%, 96%, 97%, 98%, or 99% identical to a DNA sequence in the CBLB gene (SEQ ID NO: 7) or the Cblb gene (SEQ ID NO: 8) and the at least one ZC3H12A-targeting TAL effector domain binds to a target DNA sequence that is at least 95%, 96%, 97%, 98%, or 99% identical to a DNA sequence in the ZC3H12A gene (SEQ ID NO: 5) or the Zc3h12a gene (SEQ ID NO: 6). In some embodiments, the at least one CBLB-targeting TAL effector domain binds to a target DNA sequence that is 100% identical to a DNA sequence in the CBLB gene (SEQ ID NO: 7) or the Cblb gene (SEQ ID NO: 8) and the at least one ZC3H12A-targeting TAL effector domain binds to a target DNA sequence that is 100% identical to a DNA sequence in the ZC3H12A gene (SEQ ID NO: 5) or the Zc3h12a gene (SEQ ID NO: 6).

[0582] In some embodiments, the at least one CBLB-targeting TAL effector domain binds to a target DNA sequence that is at least 95%, 96%, 97%, 98%, or 99% identical to a DNA sequence defined by a set of genomic coordinates shown in Table 17 or Table 18 and the at least one ZC3H12A-targeting TAL effector domain binds to a target DNA sequence that is at least 95%, 96%, 97%, 98%, or 99% identical to a DNA sequence defined by a set of genomic coordinates shown in Table 11 or Table 12. In some embodiments, the at least one CBLB-targeting TAL effector domain binds to a target DNA sequence that is 100% identical to a DNA sequence defined by a set of genomic coordinates shown in Table 17 or Table 18 and the at least one ZC3H12A-targeting TAL effector domain binds to a target DNA sequence that is 100% identical to a DNA sequence defined by a set of genomic coordinates shown in Table 11 or Table 12.

[0583] In some embodiments, the at least one CBLB-targeting TAL effector domain binds to a target DNA sequence that is at least 95%, 96%, 97%, 98%, or 99% identical to one of SEQ ID NOs: 798-823 or 798-808 and the at least one ZC3H12A-targeting TAL effector domain binds to a target DNA sequence that is at least 95%, 96%, 97%, 98%, or 99% identical to one of SEQ ID NOs: 331-797 or 338-789. In some embodiments, the at least one CBLB-targeting TAL effector domain binds to a target DNA sequence that is 100% identical to one of SEQ ID NOs: 798-823 or 798-808 and the at least one ZC3H12A-targeting TAL effector domain binds to a target DNA sequence that is 100% identical to one of SEQ ID NOs: 331-797 or 338-789.

[0584] In some embodiments, the protein-based gene-regulating system comprises at least two Talen fusion proteins, wherein at least one Talen fusion protein comprises a SOCS1-targeting TAL effector domain and at least one Talen fusion protein comprises a CBLB-targeting TAL effector domain. In some embodiments, the at least one SOCS1-targeting TAL effector domain binds to a target DNA sequence that is at least 95%, 96%, 97%, 98%, or 99% identical to a DNA sequence in the SOCS1 gene (SEQ ID NO: 1) or the Socs1 gene (SEQ ID NO: 2) and the at least one CBLB-targeting TAL effector domain binds to a target DNA sequence that is at least 95%, 96%, 97%, 98%, or 99% identical to a DNA sequence in the CBLB gene (SEQ ID NO: 7) or the Cblb gene (SEQ ID NO: 8). In some embodiments, the at least one SOCS1-targeting TAL effector domain binds to a target DNA sequence that is 100% identical to a DNA sequence in the SOCS1 gene (SEQ ID NO: 1) or the Socs1 gene (SEQ ID NO: 2) and the at least one CBLB-targeting TAL effector domain binds to a target DNA sequence that is 100% identical to a DNA sequence in the CBLB gene (SEQ ID NO: 7) or the Cblb gene (SEQ ID NO: 8).

[0585] In some embodiments, the at least one SOCS1-targeting TAL effector domain binds to a target DNA sequence that is at least 95%, 96%, 97%, 98%, or 99% identical to a DNA sequence defined by a set of genomic coordinates shown in Table 4 or Table 5 and the at least one CBLB-targeting TAL effector domain binds to a target DNA sequence that is at least 95%, 96%, 97%, 98%, or 99% identical to a DNA sequence defined by a set of genomic coordinates shown in Table 17 or Table 18. In some embodiments, the at least one SOCS1-targeting TAL effector domain binds to a target DNA sequence that is 100% identical to a DNA sequence defined by a set of genomic coordinates shown in Table 4 or Table 5 and the at least one CBLB-targeting TAL effector domain binds to a target DNA sequence that is 100% identical to a DNA sequence defined by a set of genomic coordinates shown in Table 17 or Table 18.

[0586] In some embodiments, the at least one SOCS1-targeting TAL effector domain binds to a target DNA sequence that is at least 95%, 96%, 97%, 98%, or 99% identical to one of SEQ ID NOs: 23-200 or 56-187 and the at least one CBLB-targeting TAL effector domain binds to a target DNA sequence that is at least 95%, 96%, 97%, 98%, or 99% identical to one of SEQ ID NOs: 798-823 or 798-808. In some embodiments, the at least one SOCS1-targeting TAL effector domain binds to a target DNA sequence that is 100% identical to one of SEQ ID NOs: 23-200 or 56-187 and the at least one CBLB-targeting TAL effector domain binds to a target DNA sequence that is 100% identical to one of SEQ ID NOs: 798-823 or 798-808.

[0587] In some embodiments, the protein-based gene-regulating system comprises at least two Talen fusion proteins, wherein at least one Talen fusion protein comprises a RC3H1-targeting TAL effector domain and at least one Talen fusion protein comprises a PTPN2-targeting TAL effector domain. In some embodiments, the at least one RC3H1-targeting TAL effector domain binds to a target DNA sequence that is at least 95%, 96%, 97%, 98%, or 99% identical to a DNA sequence in the RC3H1 gene (SEQ ID NO: 9) or the Rc3h1 gene (SEQ ID NO: 10) and the at least one PTPN2-targeting TAL effector domain binds to a target DNA sequence that is at least 95%, 96%, 97%, 98%, or 99% identical to a DNA sequence in the PTPN2 gene (SEQ ID NO: 3) or the Ptpn2 gene (SEQ ID NO: 4). In some embodiments, the at least one RC3H1-targeting TAL effector domain binds to a target DNA sequence that is 100% identical to a DNA sequence in the RC3H1 gene (SEQ ID NO: 9) or the Rc3h1 gene (SEQ ID NO: 10) and the at least one PTPN2-targeting TAL effector domain binds to a target DNA sequence that is 100% identical to a DNA sequence in the PTPN2 gene (SEQ ID NO: 3) or the Ptpn2 gene (SEQ ID NO: 4).

[0588] In some embodiments, the at least one RC3H1-targeting TAL effector domain binds to a target DNA sequence that is at least 95%, 96%, 97%, 98%, or 99% identical to a DNA sequence defined by a set of genomic coordinates shown in Table 19 or Table 20 and the at least one PTPN2-targeting TAL effector domain binds to a target DNA sequence that is at least 95%, 96%, 97%, 98%, or 99% identical to a DNA sequence defined by a set of genomic coordinates shown in Table 9 or Table 10. In some embodiments, the at least one RC3H1-targeting TAL effector domain binds to a target DNA sequence that is 100% identical to a DNA sequence defined by a set of genomic coordinates shown in Table 19 or Table 20 and the at least one PTPN2-targeting TAL effector domain binds to a target DNA sequence that is 100% identical to a DNA sequence defined by a set of genomic coordinates shown in Table 9 or Table 10.

[0589] In some embodiments, the at least one RC3H1-targeting TAL effector domain binds to a target DNA sequence that is at least 95%, 96%, 97%, 98%, or 99% identical to one of SEQ ID NOs: 824-844 or 824-836 and the at least one PTPN2-targeting TAL effector domain binds to a target DNA sequence that is at least 95%, 96%, 97%, 98%, or 99% identical to one of SEQ ID NOs: 201-327 or 201-314. In some embodiments, the at least one RC3H1-targeting TAL effector domain binds to a target DNA sequence that is 100% identical to one of SEQ ID NOs: 824-844 or 824-836 and the at least one PTPN2-targeting TAL effector domain binds to a target DNA sequence that is 100% identical to one of SEQ ID NOs: 201-327 or 201-314.

[0590] In some embodiments, the protein-based gene-regulating system comprises at least two Talen fusion proteins, wherein at least one Talen fusion protein comprises a RC3H1-targeting TAL effector domain and at least one Talen fusion protein comprises a ZC3H12A-targeting TAL effector domain. In some embodiments, the at least one RC3H1-targeting TAL effector domain binds to a target DNA sequence that is at least 95%, 96%, 97%, 98%, or 99% identical to a DNA sequence in the RC3H1 gene (SEQ ID NO: 9) or the Rc3h1 gene (SEQ ID NO: 10) and the at least one ZC3H12A-targeting TAL effector domain binds to a target DNA sequence that is at least 95%, 96%, 97%, 98%, or 99% identical to a DNA sequence in the ZC3H12A gene (SEQ ID NO: 5) or the Zc3h12a gene (SEQ ID NO: 6). In some embodiments, the at least one RC3H1-targeting TAL effector domain binds to a target DNA sequence that is 100% identical to a DNA sequence in the RC3H1 gene (SEQ ID NO: 9) or the Rc3h1 gene (SEQ ID NO: 10) and the at least one ZC3H12A-targeting TAL effector domain binds to a target DNA sequence that is 100% identical to a DNA sequence in the ZC3H12A gene (SEQ ID NO: 5) or the Zc3h12a gene (SEQ ID NO: 6).

[0591] In some embodiments, the at least one RC3H1-targeting TAL effector domain binds to a target DNA sequence that is at least 95%, 96%, 97%, 98%, or 99% identical to a DNA sequence defined by a set of genomic coordinates shown in Table 19 or Table 20 and the at least one ZC3H12A-targeting TAL effector domain binds to a target DNA sequence that is at least 95%, 96%, 97%, 98%, or 99% identical to a DNA sequence defined by a set of genomic coordinates shown in Table 11 or Table 12. In some embodiments, the at least one RC3H1-targeting TAL effector domain binds to a target DNA sequence that is 100% identical to a DNA sequence defined by a set of genomic coordinates shown in Table 19 or Table 20 and the at least one ZC3H12A-targeting TAL effector domain binds to a target DNA sequence that is 100% identical to a DNA sequence defined by a set of genomic coordinates shown in Table 11 or Table 12.

[0592] In some embodiments, the at least one RC3H1-targeting TAL effector domain binds to a target DNA sequence that is at least 95%, 96%, 97%, 98%, or 99% identical to one of SEQ ID NOs: 824-844 or 824-836 and the at least one ZC3H12A-targeting TAL effector domain binds to a target DNA sequence that is at least 95%, 96%, 97%, 98%, or 99% identical to one of SEQ ID NOs: 331-797 or 338-789. In some embodiments, the at least one RC3H1-targeting TAL effector domain binds to a target DNA sequence that is 100% identical to one of SEQ ID NOs: 824-844 or 824-836 and the at least one ZC3H12A-targeting TAL effector domain binds to a target DNA sequence that is 100% identical to one of SEQ ID NOs: 331-797 or 338-789.

[0593] In some embodiments, the protein-based gene-regulating system comprises at least two Talen fusion proteins, wherein at least one Talen fusion protein comprises a SOCS1-targeting TAL effector domain and at least one Talen fusion protein comprises a RC3H1-targeting TAL effector domain. In some embodiments, the at least one SOCS1-targeting TAL effector domain binds to a target DNA sequence that is at least 95%, 96%, 97%, 98%, or 99% identical to a DNA sequence in the SOCS1 gene (SEQ ID NO: 1) or the Socs1 gene (SEQ ID NO: 2) and the at least one RC3H1-targeting TAL effector domain binds to a target DNA sequence that is at least 95%, 96%, 97%, 98%, or 99% identical to a DNA sequence in the RC3H1 gene (SEQ ID NO: 9) or the Rc3h1 gene (SEQ ID NO: 10). In some embodiments, the at least one SOCS1-targeting TAL effector domain binds to a target DNA sequence that is 100% identical to a DNA sequence in the SOCS1 gene (SEQ ID NO: 1) or the Socs1 gene (SEQ ID NO: 2) and the at least one RC3H1-targeting TAL effector domain binds to a target DNA sequence that is 100% identical to a DNA sequence in the RC3H1 gene (SEQ ID NO: 9) or the Rc3h1 gene (SEQ ID NO: 10).

[0594] In some embodiments, the at least one SOCS1-targeting TAL effector domain binds to a target DNA sequence that is at least 95%, 96%, 97%, 98%, or 99% identical to a DNA sequence defined by a set of genomic coordinates shown in Table 4 or Table 5 and the at least one RC3H1-targeting TAL effector domain binds to a target DNA sequence that is at least 95%, 96%, 97%, 98%, or 99% identical to a DNA sequence defined by a set of genomic coordinates shown in Table 19 or Table 20. In some embodiments, the at least one SOCS1-targeting TAL effector domain binds to a target DNA sequence that is 100% identical to a DNA sequence defined by a set of genomic coordinates shown in Table 4 or Table 5 and the at least one RC3H1-targeting TAL effector domain binds to a target DNA sequence that is 100% identical to a DNA sequence defined by a set of genomic coordinates shown in Table 19 or Table 20.

[0595] In some embodiments, the protein-based gene-regulating system comprises at least two Talen fusion proteins, wherein at least one Talen fusion protein comprises a CBLB-targeting TAL effector domain and at least one Talen fusion protein comprises a RC3H1-targeting TAL effector domain. In some embodiments, the at least one CBLB-targeting TAL effector domain binds to a target DNA sequence that is at least 95%, 96%, 97%, 98%, or 99% identical to a DNA sequence in the CBLB gene (SEQ ID NO: 7) or the Cblb gene (SEQ ID NO: 8) and the at least one RC3H1-targeting TAL effector domain binds to a target DNA sequence that is at least 95%, 96%, 97%, 98%, or 99% identical to a DNA sequence in the RC3H1 gene (SEQ ID NO: 9) or the Rc3h1 gene (SEQ ID NO: 10). In some embodiments, the at least one CBLB-targeting TAL effector domain binds to a target DNA sequence that is 100% identical to a DNA sequence in the CBLB gene (SEQ ID NO: 7) or the Cblb gene (SEQ ID NO: 8) and the at least one RC3H1-targeting TAL effector domain binds to a target DNA sequence that is 100% identical to a DNA sequence in the RC3H1 gene (SEQ ID NO: 9) or the Rc3h1 gene (SEQ ID NO: 10).

[0596] In some embodiments, the at least one CBLB-targeting TAL effector domain binds to a target DNA sequence that is at least 95%, 96%, 97%, 98%, or 99% identical to a DNA sequence defined by a set of genomic coordinates shown in Table 17 or Table 18 and the at least one RC3H1-targeting TAL effector domain binds to a target DNA sequence that is at least 95%, 96%, 97%, 98%, or 99% identical to a DNA sequence defined by a set of genomic coordinates shown in Table 19 or Table 20. In some embodiments, the at least one CBLB-targeting TAL effector domain binds to a target DNA sequence that is 100% identical to a DNA sequence defined by a set of genomic coordinates shown in Table 17 or Table 18 and the at least one RC3H1-targeting TAL effector domain binds to a target DNA sequence that is 100% identical to a DNA sequence defined by a set of genomic coordinates shown in Table 19 or Table 20.

[0597] In some embodiments, the at least one CBLB-targeting TAL effector domain binds to a target DNA sequence that is at least 95%, 96%, 97%, 98%, or 99% identical to one of SEQ ID NOs: 798-823 or 798-808 and the at least one RC3H1-targeting TAL effector domain binds to a target DNA sequence that is at least 95%, 96%, 97%, 98%, or 99% identical to one of SEQ ID NOs: 824-844 or 824-836. In some embodiments, the at least one CBLB-targeting TAL effector domain binds to a target DNA sequence that is 100% identical to one of SEQ ID NOs: 798-823 or 798-808 and the at least one RC3H1-targeting TAL effector domain binds to a target DNA sequence that is 100% identical to one of SEQ ID NOs: 824-844 or 824-836.

[0598] In some embodiments, the protein-based gene-regulating system comprises at least two Talen fusion proteins, wherein at least one Talen fusion protein comprises a NFKBIA-targeting TAL effector domain and at least one Talen fusion protein comprises a PTPN2-targeting TAL effector domain. In some embodiments, the at least one NFKBIA-targeting TAL effector domain binds to a target DNA sequence that is at least 95%, 96%, 97%, 98%, or 99% identical to a DNA sequence in the NFKBIA gene (SEQ ID NO: 11) or the Nfkbia gene (SEQ ID NO: 12) and the at least one PTPN2-targeting TAL effector domain binds to a target DNA sequence that is at least 95%, 96%, 97%, 98%, or 99% identical to a DNA sequence in the PTPN2 gene (SEQ ID NO: 3) or the Ptpn2 gene (SEQ ID NO: 4). In some embodiments, the at least one NFKBIA-targeting TAL effector domain binds to a target DNA sequence that is 100% identical to a DNA sequence in the NFKBIA gene (SEQ ID NO: 11) or the Nfkbia gene (SEQ ID NO: 12) and the at least one PTPN2-targeting TAL effector domain binds to a target DNA sequence that is 100% identical to a DNA sequence in the PTPN2 gene (SEQ ID NO: 3) or the Ptpn2 gene (SEQ ID NO: 4).

[0599] In some embodiments, the at least one NFKBIA-targeting TAL effector domain binds to a target DNA sequence that is at least 95%, 96%, 97%, 98%, or 99% identical to a DNA sequence defined by a set of genomic coordinates shown in Table 21 or Table 22 and the at least one PTPN2-targeting TAL effector domain binds to a target DNA sequence that is at least 95%, 96%, 97%, 98%, or 99% identical to a DNA sequence defined by a set of genomic coordinates shown in Table 9 or Table 10. In some embodiments, the at least one NFKBIA-targeting TAL effector domain binds to a target DNA sequence that is 100% identical to a DNA sequence defined by a set of genomic coordinates shown in Table 21 or Table 22 and the at least one PTPN2-targeting TAL effector domain binds to a target DNA sequence that is 100% identical to a DNA sequence defined by a set of genomic coordinates shown in Table 9 or Table 10.

[0600] In some embodiments, the at least one NFKBIA-targeting TAL effector domain binds to a target DNA sequence that is at least 95%, 96%, 97%, 98%, or 99% identical to one of SEQ ID NOs: 845-875 or 845-856 and the at least one PTPN2-targeting TAL effector domain binds to a target DNA sequence that is at least 95%, 96%, 97%, 98%, or 99% identical to one of SEQ ID NOs: 201-327 or 201-314. In some embodiments, the at least one NFKBIA-targeting TAL effector domain binds to a target DNA sequence that is 100% identical to one of SEQ ID NOs: 845-875 or 845-856 and the at least one PTPN2-targeting TAL effector domain binds to a target DNA sequence that is 100% identical to one of SEQ ID NOs: 201-327 or 201-314.

[0601] In some embodiments, the protein-based gene-regulating system comprises at least two Talen fusion proteins, wherein at least one Talen fusion protein comprises a NFKBIA-targeting TAL effector domain and at least one Talen fusion protein comprises a ZC3H12A-targeting TAL effector domain. In some embodiments, the at least one NFKBIA-targeting TAL effector domain binds to a target DNA sequence that is at least 95%, 96%, 97%, 98%, or 99% identical to a DNA sequence in the NFKBIA gene (SEQ ID NO: 11) or the Nfkbia gene (SEQ ID NO: 12) and the at least one ZC3H12A-targeting TAL effector domain binds to a target DNA sequence that is at least 95%, 96%, 97%, 98%, or 99% identical to a DNA sequence in the ZC3H12A gene (SEQ ID NO: 5) or the Zc3h12a gene (SEQ ID NO: 6). In some embodiments, the at least one NFKBIA-targeting TAL effector domain binds to a target DNA sequence that is 100% identical to a DNA sequence in the NFKBIA gene (SEQ ID NO: 11) or the Nfkbia gene (SEQ ID NO: 12) and the at least one ZC3H12A-targeting TAL effector domain binds to a target DNA sequence that is 100% identical to a DNA sequence in the ZC3H12A gene (SEQ ID NO: 5) or the Zc3h12a gene (SEQ ID NO: 6).

[0602] In some embodiments, the at least one NFKBIA-targeting TAL effector domain binds to a target DNA sequence that is at least 95%, 96%, 97%, 98%, or 99% identical to a DNA sequence defined by a set of genomic coordinates shown in Table 21 or Table 22 and the at least one ZC3H12A-targeting TAL effector domain binds to a target DNA sequence that is at least 95%, 96%, 97%, 98%, or 99% identical to a DNA sequence defined by a set of genomic coordinates shown in Table 11 or Table 12. In some embodiments, the at least one NFKBIA-targeting TAL effector domain binds to a target DNA sequence that is 100% identical to a DNA sequence defined by a set of genomic coordinates shown in Table 21 or Table 22 and the at least one ZC3H12A-targeting TAL effector domain binds to a target DNA sequence that is 100% identical to a DNA sequence defined by a set of genomic coordinates shown in Table 11 or Table 12.

[0603] In some embodiments, the at least one NFKBIA-targeting TAL effector domain binds to a target DNA sequence that is at least 95%, 96%, 97%, 98%, or 99% identical to one of SEQ ID NOs: 845-875 or 845-856 and the at least one ZC3H12A-targeting TAL effector domain binds to a target DNA sequence that is at least 95%, 96%, 97%, 98%, or 99% identical to one of SEQ ID NOs: 331-797 or 338-789. In some embodiments, the at least one NFKBIA-targeting TAL effector domain binds to a target DNA sequence that is 100% identical to one of SEQ ID NOs: 845-875 or 845-856 and the at least one ZC3H12A-targeting TAL effector domain binds to a target DNA sequence that is 100% identical to one of SEQ ID NOs: 331-797 or 338-789.

[0604] In some embodiments, the protein-based gene-regulating system comprises at least two Talen fusion proteins, wherein at least one Talen fusion protein comprises a SOCS1-targeting TAL effector domain and at least one Talen fusion protein comprises a NFKBIA-targeting TAL effector domain. In some embodiments, the at least one SOCS1-targeting TAL effector domain binds to a target DNA sequence that is at least 95%, 96%, 97%, 98%, or 99% identical to a DNA sequence in the SOCS1 gene (SEQ ID NO: 1) or the Socs1 gene (SEQ ID NO: 2) and the at least one NFKBIA-targeting TAL effector domain binds to a target DNA sequence that is at least 95%, 96%, 97%, 98%, or 99% identical to a DNA sequence in the NFKBIA gene (SEQ ID NO: 11) or the Nfkbia gene (SEQ ID NO: 12). In some embodiments, the at least one SOCS1-targeting TAL effector domain binds to a target DNA sequence that is 100% identical to a DNA sequence in the SOCS1 gene (SEQ ID NO: 1) or the Socs1 gene (SEQ ID NO: 2) and the at least one NFKBIA-targeting TAL effector domain binds to a target DNA sequence that is 100% identical to a DNA sequence in the NFKBIA gene (SEQ ID NO: 11) or the Nfkbia gene (SEQ ID NO: 12).

[0605] In some embodiments, the at least one SOCS1-targeting TAL effector domain binds to a target DNA sequence that is at least 95%, 96%, 97%, 98%, or 99% identical to a DNA sequence defined by a set of genomic coordinates shown in Table 4 or Table 5 and the at least one NFKBIA-targeting TAL effector domain binds to a target DNA sequence that is at least 95%, 96%, 97%, 98%, or 99% identical to a DNA sequence defined by a set of genomic coordinates shown in Table 21 or Table 22. In some embodiments, the at least one SOCS1-targeting TAL effector domain binds to a target DNA sequence that is 100% identical to a DNA sequence defined by a set of genomic coordinates shown in Table 4 or Table 5 and the at least one NFKBIA-targeting TAL effector domain binds to a target DNA sequence that is 100% identical to a DNA sequence defined by a set of genomic coordinates shown in Table 21 or Table 22.

[0606] In some embodiments, the at least one SOCS1-targeting TAL effector domain binds to a target DNA sequence that is at least 95%, 96%, 97%, 98%, or 99% identical to one of SEQ ID NOs: 23-200 or 56-187 and the at least one NFKBIA-targeting TAL effector domain binds to a target DNA sequence that is at least 95%, 96%, 97%, 98%, or 99% identical to one of SEQ ID NOs: 845-875 or 845-856. In some embodiments, the at least one SOCS1-targeting TAL effector domain binds to a target DNA sequence that is 100% identical to one of SEQ ID NOs: 23-200 or 56-187 and the at least one NFKBIA-targeting TAL effector domain binds to a target DNA sequence that is 100% identical to one of SEQ ID NOs: 845-875 or 845-856.

[0607] In some embodiments, the protein-based gene-regulating system comprises at least two Talen fusion proteins, wherein at least one Talen fusion protein comprises a CBLB-targeting TAL effector domain and at least one Talen fusion protein comprises a NFKBIA-targeting TAL effector domain. In some embodiments, the at least one CBLB-targeting TAL effector domain binds to a target DNA sequence that is at least 95%, 96%, 97%, 98%, or 99% identical to a DNA sequence in the CBLB gene (SEQ ID NO: 7) or the Cblb gene (SEQ ID NO: 8) and the at least one NFKBIA-targeting TAL effector domain binds to a target DNA sequence that is at least 95%, 96%, 97%, 98%, or 99% identical to a DNA sequence in the NFKBIA gene (SEQ ID NO: 11) or the Nfkbia gene (SEQ ID NO: 12). In some embodiments, the at least one CBLB-targeting TAL effector domain binds to a target DNA sequence that is 100% identical to a DNA sequence in the CBLB gene (SEQ ID NO: 7) or the Cblb gene (SEQ ID NO: 8) and the at least one NFKBIA-targeting TAL effector domain binds to a target DNA sequence that is 100% identical to a DNA sequence in the NFKBIA gene (SEQ ID NO: 11) or the Nfkbia gene (SEQ ID NO: 12).

[0608] In some embodiments, the at least one CBLB-targeting TAL effector domain binds to a target DNA sequence that is at least 95%, 96%, 97%, 98%, or 99% identical to a DNA sequence defined by a set of genomic coordinates shown in Table 17 or Table 18 and the at least one NFKBIA-targeting TAL effector domain binds to a target DNA sequence that is at least 95%, 96%, 97%, 98%, or 99% identical to a DNA sequence defined by a set of genomic coordinates shown in Table 21 or Table 22. In some embodiments, the at least one CBLB-targeting TAL effector domain binds to a target DNA sequence that is 100% identical to a DNA sequence defined by a set of genomic coordinates shown in Table 17 or Table 18 and the at least one NFKBIA-targeting TAL effector domain binds to a target DNA sequence that is 100% identical to a DNA sequence defined by a set of genomic coordinates shown in Table 21 or Table 22.

[0609] In some embodiments, the at least one CBLB-targeting TAL effector domain binds to a target DNA sequence that is at least 95%, 96%, 97%, 98%, or 99% identical to one of SEQ ID NOs: 798-823 or 798-808 and the at least one NFKBIA-targeting TAL effector domain binds to a target DNA sequence that is at least 95%, 96%, 97%, 98%, or 99% identical to one of SEQ ID NOs: 845-875 or 845-856. In some embodiments, the at least one CBLB-targeting TAL effector domain binds to a target DNA sequence that is 100% identical to one of SEQ ID NOs: 798-823 or 798-808 and the at least one NFKBIA-targeting TAL effector domain binds to a target DNA sequence that is 100% identical to one of SEQ ID NOs: 845-875 or 845-856.

[0610] In some embodiments, the protein-based gene-regulating system comprises at least two Talen fusion proteins, wherein at least one Talen fusion protein comprises a RC3H1-targeting TAL effector domain and at least one Talen fusion protein comprises a NFKBIA-targeting TAL effector domain. In some embodiments, the at least one RC3H1-targeting TAL effector domain binds to a target DNA sequence that is at least 95%, 96%, 97%, 98%, or 99% identical to a DNA sequence in the RC3H1 gene (SEQ ID NO: 9) or the Rc3h1 gene (SEQ ID NO: 10) and the at least one NFKBIA-targeting TAL effector domain binds to a target DNA sequence that is at least 95%, 96%, 97%, 98%, or 99% identical to a DNA sequence in the NFKBIA gene (SEQ ID NO: 11) or the Nfkbia gene (SEQ ID NO: 12). In some embodiments, the at least one RC3H1-targeting TAL effector domain binds to a target DNA sequence that is 100% identical to a DNA sequence in the RC3H1 gene (SEQ ID NO: 9) or the Rc3h1 gene (SEQ ID NO: 10) and the at least one NFKBIA-targeting TAL effector domain binds to a target DNA sequence that is 100% identical to a DNA sequence in the NFKBIA gene (SEQ ID NO: 11) or the Nfkbia gene (SEQ ID NO: 12).

[0611] In some embodiments, the at least one RC3H1-targeting TAL effector domain binds to a target DNA sequence that is at least 95%, 96%, 97%, 98%, or 99% identical to a DNA sequence defined by a set of genomic coordinates shown in Table 19 or Table 20 and the at least one NFKBIA-targeting TAL effector domain binds to a target DNA sequence that is at least 95%, 96%, 97%, 98%, or 99% identical to a DNA sequence defined by a set of genomic coordinates shown in Table 21 or Table 22. In some embodiments, the at least one RC3H1-targeting TAL effector domain binds to a target DNA sequence that is 100% identical to a DNA sequence defined by a set of genomic coordinates shown in Table 19 or Table 20 and the at least one NFKBIA-targeting TAL effector domain binds to a target DNA sequence that is 100% identical to a DNA sequence defined by a set of genomic coordinates shown in Table 21 or Table 22.

[0612] In some embodiments, the at least one RC3H1-targeting TAL effector domain binds to a target DNA sequence that is at least 95%, 96%, 97%, 98%, or 99% identical to one of SEQ ID NOs: 824-844 or 824-836 and the at least one NFKBIA-targeting TAL effector domain binds to a target DNA sequence that is at least 95%, 96%, 97%, 98%, or 99% identical to one of SEQ ID NOs: 845-875 or 845-856. In some embodiments, the at least one RC3H1-targeting TAL effector domain binds to a target DNA sequence that is 100% identical to one of SEQ ID NOs: 824-844 or 824-836 and the at least one NFKBIA-targeting TAL effector domain binds to a target DNA sequence that is 100% identical to one of SEQ ID NOs: 845-875 or 845-856.

### Combination Nucleic Acid/Protein-Based Gene-Regulating Systems

[0613] Combination gene-regulating systems comprise a site-directed modifying polypeptide and a nucleic acid guide molecule. Herein, a “site-directed modifying polypeptide” refers to a polypeptide that binds to a nucleic acid guide molecule, is targeted to a target nucleic acid sequence, (for example, an endogenous target DNA or RNA sequence) by the nucleic acid guide molecule to which it is bound, and modifies the target nucleic acid sequence (e.g., cleavage, mutation, or methylation of a target nucleic acid sequence).

[0614] A site-directed modifying polypeptide comprises two portions, a portion that binds the nucleic acid guide and an activity portion. In some embodiments, a site-directed modifying polypeptide comprises an activity portion that exhibits site-directed enzymatic activity (e.g., DNA methylation, DNA or RNA cleavage, histone acetylation, histone methylation, etc.), wherein the site of enzymatic activity is determined by the guide nucleic acid. In some cases, a site-directed modifying polypeptide comprises an activity portion that has enzymatic activity that modifies the endogenous target nucleic acid sequence (e.g., nuclease activity, methyltransferase activity, demethylase activity, DNA repair activity, DNA damage activity, deamination activity, dismutase activity, alkylation activity, depurination activity, oxidation activity, pyrimidine dimer forming activity, integrase activity, transposase activity, recombinase activity, polymerase activity, ligase activity, helicase activity, photolyase activity or glycosylase activity). In other cases, a site-directed modifying polypeptide comprises an activity portion that has enzymatic activity that modifies a polypeptide (e.g., a histone) associated with the endogenous target nucleic acid sequence (e.g., methyltransferase activity, demethylase activity, acetyltransferase activity, deacetylase activity, kinase activity, phosphatase activity, ubiquitin ligase activity, deubiquitinating activity, adenylation activity, deadenylation activity, SUMOylating activity, deSUMOylating activity, ribosylation activity, deribosylation activity, myristoylation activity or demyristoylation activity). In some embodiments, a site-directed modifying polypeptide comprises an activity portion that modulates transcription of a target DNA sequence (e.g., to increase or decrease transcription). In some embodiments, a site-directed modifying polypeptide comprises an activity portion that modulates expression or translation of a target RNA sequence (e.g., to increase or decrease transcription).

[0615] The nucleic acid guide comprises two portions: a first portion that is complementary to, and capable of binding with, an endogenous target nucleic sequence (referred to herein as a “nucleic acid-binding segment”), and a second portion that is capable of interacting with the site-directed modifying polypeptide (referred to herein as a “protein-binding segment”). In some embodiments, the nucleic acid-binding segment and protein-binding segment of a nucleic acid guide are comprised within a single polynucleotide molecule. In some embodiments, the nucleic acid-binding segment and protein-binding segment of a nucleic acid guide are each comprised within separate polynucleotide molecules, such that the nucleic acid guide comprises two polynucleotide molecules that associate with each other to form the functional guide.

[0616] The nucleic acid guide mediates the target specificity of the combined protein/nucleic acid gene-regulating systems by specifically hybridizing with a target nucleic acid sequence. In some embodiments, the target nucleic acid sequence is an RNA sequence, such as an RNA sequence comprised within an mRNA transcript of a target gene. In some embodiments, the target nucleic acid sequence is a DNA sequence comprised within the DNA sequence of a target gene. Reference herein to a target gene encompasses the full-length DNA sequence for that particular gene which comprises a plurality of target genetic loci (i.e., portions of a particular target gene sequence (e.g., an exon or an intron)). Within each target genetic loci are shorter stretches of DNA sequences referred to herein as “target DNA sequences” that can be modified by the gene-regulating systems described herein. Further, each target genetic loci comprises a “target modification site,” which refers to the precise location of the modification induced by the gene-regulating system (e.g., the location of an insertion, a deletion, or mutation, the location of a DNA break, or the location of an epigenetic modification). The gene-regulating systems described herein may comprise 2 or more nucleic acid guides (e.g., 2, 3, 4, 5, 6, 7, 8, 9, 10, or more nucleic acid guides).

[0617] In some embodiments, the combined protein/nucleic acid gene-regulating systems comprise site-directed modifying polypeptides derived from Argonaute (Ago) proteins (e.g., T. thermophiles Ago or TtAgo). In such embodiments, the site-directed modifying polypeptide is a T. thermophiles Ago DNA endonuclease, and the nucleic acid guide is a guide DNA (gDNA) (See, Swarts et al., Nature 507 (2014), 258-261). In some embodiments, the present disclosure provides a polynucleotide encoding a gDNA. In some embodiments, a gDNA-encoding nucleic acid is comprised in an expression vector, e.g., a recombinant expression vector. In some embodiments, the present disclosure provides a polynucleotide encoding a TtAgo site-directed modifying polypeptide or variant thereof. In some embodiments, the polynucleotide encoding a TtAgo site-directed modifying polypeptide is comprised in an expression vector, e.g., a recombinant expression vector.

[0618] In some embodiments, the gene editing systems described herein are CRISPR (Clustered Regularly Interspaced Short Palindromic Repeats)/Cas (CRISPR Associated) nuclease systems. In some embodiments, the CRISPR/Cas system is a Class 2 system. Class 2 CRISPR/Cas systems are divided into three types: Type II, Type V, and Type VI systems. In some embodiments, the CRISPR/Cas system is a Class 2 Type II system, utilizing the Cas9 protein. In such embodiments, the site-directed modifying polypeptide is a Cas9 DNA endonuclease (or variant thereof), and the nucleic acid guide molecule is a guide RNA (gRNA). In some embodiments, the CRISPR/Cas system is a Class 2 Type V system, utilizing the Cas12 proteins (e.g., Cas12a (also known as Cpf1), Cas12b (also known as C2c1), Cas12c (also known as C2c3), Cas12d (also known as CasY), and Cas12e (also known as CasX)). In such embodiments, the site-directed modifying polypeptide is a Cas12 DNA endonuclease (or variant thereof), and the nucleic acid guide molecule is a gRNA. In some embodiments, the CRISPR/Cas system is a Class 2 and Type VI system, utilizing the Cas13 proteins (e.g., Cas13a (also known as C2c2), Cas13b, and Cas13c). (See, Pyzocha et al., ACS Chemical Biology, 13(2), 347-356). In such embodiments, the site-directed modifying polypeptide is a Cas13 RNA riboendonuclease and the nucleic acid guide molecule is a gRNA.

[0619] A Cas polypeptide refers to a polypeptide that can interact with a gRNA molecule and, in concert with the gRNA molecule, home or localize to a target DNA or target RNA sequence. Cas polypeptides include naturally occurring Cas proteins and engineered, altered, or otherwise modified Cas proteins that differ by one or more amino acid residues from a naturally-occurring Cas sequence.

[0620] A guide RNA (gRNA) comprises two segments, a DNA-binding segment and a protein-binding segment. In some embodiments, the protein-binding segment of a gRNA is comprised in one RNA molecule and the DNA-binding segment is comprised in another separate RNA molecule. Such embodiments are referred to herein as “double-molecule gRNAs” or “two-molecule gRNA” or “dual gRNAs.” In some embodiments, the gRNA is a single RNA molecule and is referred to herein as a “single-guide RNA” or an “sgRNA.” The term “guide RNA” or “gRNA” is inclusive, referring both to two-molecule guide RNAs and sgRNAs.

[0621] The protein-binding segment of a gRNA comprises, in part, two complementary stretches of nucleotides that hybridize to one another to form a double stranded RNA duplex (dsRNA duplex), which facilitates binding to the Cas protein. The nucleic acid-binding segment (or “nucleic acid-binding sequence”) of a gRNA comprises a nucleotide sequence that is complementary to and capable of binding to a specific target nucleic acid sequence. The protein-binding segment of the gRNA interacts with a Cas polypeptide and the interaction of the gRNA molecule and site-directed modifying polypeptide results in Cas binding to the endogenous nucleic acid sequence and produces one or more modifications within or around the target nucleic acid sequence. The precise location of the target modification site is determined by both (i) base-pairing complementarity between the gRNA and the target nucleic acid sequence; and (ii) the location of a short motif, referred to as the protospacer adjacent motif (PAM), in the target DNA sequence (referred to as a protospacer flanking sequence (PFS) in target RNA sequences). The PAM/PFS sequence is required for Cas binding to the target nucleic acid sequence. A variety of PAM/PFS sequences are known in the art and are suitable for use with a particular Cas endonuclease (e.g., a Cas9 endonuclease). (See e.g., Nat Methods. 2013 November; 10(11): 1116-1121 and Sci Rep. 2014; 4: 5405). In some embodiments, the PAM sequence is located within 50 base pairs of the target modification site in a target DNA sequence. In some embodiments, the PAM sequence is located within 10 base pairs of the target modification site in a target DNA sequence. The DNA sequences that can be targeted by this method are limited only by the relative distance of the PAM sequence to the target modification site and the presence of a unique 20 base pair sequence to mediate sequence-specific, gRNA-mediated Cas binding. In some embodiments, the PFS sequence is located at the 3′ end of the target RNA sequence. In some embodiments, the target modification site is located at the 5′ terminus of the target locus. In some embodiments, the target modification site is located at the 3′ end of the target locus. In some embodiments, the target modification site is located within an intron or an exon of the target locus.

[0622] In some embodiments, the present disclosure provides a polynucleotide encoding a gRNA. In some embodiments, a gRNA-encoding nucleic acid is comprised in an expression vector, e.g., a recombinant expression vector. In some embodiments, the present disclosure provides a polynucleotide encoding a site-directed modifying polypeptide. In some embodiments, the polynucleotide encoding a site-directed modifying polypeptide is comprised in an expression vector, e.g., a recombinant expression vector.

### Cas Proteins

[0623] In some embodiments, the site-directed modifying polypeptide is a Cas protein. Cas molecules of a variety of species can be used in the methods and compositions described herein, including Cas molecules derived from S. pyogenes, S. aureus, N. meningitidis, S. thermophiles, Acidovorax avenae, Actinobacillus pleuropneumoniae, Actinobacillus succinogenes, Actinobacillus suis, Actinomyces sp., Cyclophilus denitrificans, Aminomonas paucivorans, Bacillus cereus, Bacillus smithii, Bacillus thuringiensis, Bacteroides sp., Blastopirellula marina, Bradyrhizobium sp., Brevibacillus laterospoxus, Campylobacter coli, Campylobacter jejuni, Campylobacter lari, Candidatus puniceispirillum, Clostridium cellulolyticum, Clostridium perfringens, Corynebacterium accolens, Corynebacterium diphtheria, Corynebacterium matruchotii, Dinoroseobacter shibae, Eubacterium dolichum, Gammaproteobacterium, Gluconacetobacter diazotrophicus, Haemophilus parainfluenzae, Haemophilus sputomm, Helicobacter canadensis, Helicobacter cinaedi, Helicobacter mustelae, Ilyobacter polytropus, Kingella kingae, Lactobacillus crispatus, Listeria ivanovii, Listeria monocytogenes, Listeriaceae bacterium, Methylocystis sp., Methylosinus trichosporium, Mobiluncus mulieris, Neisseria bacilliformis, Neisseria cinerea, Neisseria flavescens, Neisseria lactamica, Neisseria meningitidis, Neisseria sp., Neisseria wadsworthii, Nitrosomonas sp., Parvibaculum lavamentivorans, Pasteurella multocida, Phascolarctobacterium succinatutens, Ralstonia syzygii, Rhodopseudomonas palustris, Rhodovulum sp., Simonsiella muelleri, Sphingomonas sp., Sporolactobacillus vineae, Staphylococcus aureus, Staphylococcus lugdunensis, Streptococcus sp., Subdoligranulum sp., Tistrella mobilis, Treponema sp., or Verminephrobacter eiseniae.

[0624] In some embodiments, the Cas protein is a naturally-occurring Cas protein. In some embodiments, the Cas endonuclease is selected from the group consisting of C2C1, C2C3, Cpf1 (also referred to as Cas12a), Cas12b, Cas12c, Cas12d, Cas12e, Cas13a, Cas13b, Cas13c, Cas13d, Cas1, Cas1B, Cas2, Cas3, Cas4, Cas5, Cas6, Cas7, Cas8, Cas9 (also known as Csn1 and Csx12), Cas10, Csy1, Csy2, Csy3, Cse1, Cse2, Csc1, Csc2, Csa5, Csn2, Csm2, Csm3, Csm4, Csm5, Csm6, Cmr1, Cmr3, Cmr4, Cmr5, Cmr6, Csb1, Csb2, Csb3, Csx17, Csx14, Csx10, Csx16, CsaX, Csx3, Csx1, Csx15, Csf1, Csf2, Csf3, and Csf4.

[0625] In some embodiments, the Cas protein is an endoribonuclease such as a Cas13 protein. In some embodiments, the Cas13 protein is a Cas13a (Abudayyeh et al., Nature 550 (2017), 280-284), Cas13b (Cox et al., Science (2017) 358:6336, 1019-1027), Cas13c (Cox et al., Science (2017) 358:6336, 1019-1027), or Cas13d (Zhang et al., Cell 175 (2018), 212-223) protein.

[0626] In some embodiments, the Cas protein is a wild-type or naturally occurring Cas9 protein or a Cas9 ortholog. Wild-type Cas9 is a multi-domain enzyme that uses an HNH nuclease domain to cleave the target strand of DNA and a RuvC-like domain to cleave the non-target strand. Binding of WT Cas9 to DNA based on gRNA specificity results in double-stranded DNA breaks that can be repaired by non-homologous end joining (NHEJ) or homology-directed repair (HDR). Exemplary naturally occurring Cas9 molecules are described in Chylinski et al., RNA Biology 2013 10:5, 727-737 and additional Cas9 orthologs are described in International PCT Publication No. WO 2015/071474. Such Cas9 molecules include Cas9 molecules of a cluster 1 bacterial family, cluster 2 bacterial family, cluster 3 bacterial family, cluster 4 bacterial family, cluster 5 bacterial family, cluster 6 bacterial family, a cluster 7 bacterial family, a cluster 8 bacterial family, a cluster 9 bacterial family, a cluster 10 bacterial family, a cluster 11 bacterial family, a cluster 12 bacterial family, a cluster 13 bacterial family, a cluster 14 bacterial family, a cluster 15 bacterial family, a cluster 16 bacterial family, a cluster 17 bacterial family, a cluster 18 bacterial family, a cluster 19 bacterial family, a cluster 20 bacterial family, a cluster 21 bacterial family, a cluster 22 bacterial family, a cluster 23 bacterial family, a cluster 24 bacterial family, a cluster 25 bacterial family, a cluster 26 bacterial family, a cluster 27 bacterial family, a cluster 28 bacterial family, a cluster 29 bacterial family, a cluster 30 bacterial family, a cluster 31 bacterial family, a cluster 32 bacterial family, a cluster 33 bacterial family, a cluster 34 bacterial family, a cluster 35 bacterial family, a cluster 36 bacterial family, a cluster 37 bacterial family, a cluster 38 bacterial family, a cluster 39 bacterial family, a cluster 40 bacterial family, a cluster 41 bacterial family, a cluster 42 bacterial family, a cluster 43 bacterial family, a cluster 44 bacterial family, a cluster 45 bacterial family, a cluster 46 bacterial family, a cluster 47 bacterial family, a cluster 48 bacterial family, a cluster 49 bacterial family, a cluster 50 bacterial family, a cluster 51 bacterial family, a cluster 52 bacterial family, a cluster 53 bacterial family, a cluster 54 bacterial family, a cluster 55 bacterial family, a cluster 56 bacterial family, a cluster 57 bacterial family, a cluster 58 bacterial family, a cluster 59 bacterial family, a cluster 60 bacterial family, a cluster 61 bacterial family, a cluster 62 bacterial family, a cluster 63 bacterial family, a cluster 64 bacterial family, a cluster 65 bacterial family, a cluster 66 bacterial family, a cluster 67 bacterial family, a cluster 68 bacterial family, a cluster 69 bacterial family, a cluster 70 bacterial family, a cluster 71 bacterial family, a cluster 72 bacterial family, a cluster 73 bacterial family, a cluster 74 bacterial family, a cluster 75 bacterial family, a cluster 76 bacterial family, a cluster 77 bacterial family, or a cluster 78 bacterial family.

[0627] In some embodiments, the naturally occurring Cas9 polypeptide is selected from the group consisting of SpCas9, SpCas9-HF1, SpCas9-HF2, SpCas9-HF3, SpCas9-HF4, SaCas9, FnCpf, FnCas9, eSpCas9, and NmeCas9. In some embodiments, the Cas9 protein comprises an amino acid sequence having at least 60%, 65%, 70%, 75%, 80%, 85%, 90%, 95%, 96%, 97%, 98%, 99%, or 100% sequence identity to a Cas9 amino acid sequence described in Chylinski et al., RNA Biology 2013 10:5, 727-737; Hou et al., PNAS Early Edition 2013, 1-6).

[0628] In some embodiments, the Cas polypeptide comprises one or more of the following activities:

[0629] (a) a nickase activity, i.e., the ability to cleave a single strand, e.g., the non-complementary strand or the complementary strand, of a nucleic acid molecule;

[0630] (b) a double stranded nuclease activity, i.e., the ability to cleave both strands of a double stranded nucleic acid and create a double stranded break, which in an embodiment is the presence of two nickase activities;

[0631] (c) an endonuclease activity;

[0632] (d) an exonuclease activity; and/or

[0633] (e) a helicase activity, i.e., the ability to unwind the helical structure of a double stranded nucleic acid.

[0634] In some embodiments, the Cas polypeptide is fused to heterologous proteins that recruit DNA-damage signaling proteins, exonucleases, or phosphatases to further increase the likelihood or the rate of repair of the target sequence by one repair mechanism or another. In some embodiments, a WT Cas polypeptide is co-expressed with a nucleic acid repair template to facilitate the incorporation of an exogenous nucleic acid sequence by homology-directed repair.

[0635] In some embodiments, different Cas proteins (i.e., Cas9 proteins from various species) may be advantageous to use in the various provided methods in order to capitalize on various enzymatic characteristics of the different Cas proteins (e.g., for different PAM sequence preferences; for increased or decreased enzymatic activity; for an increased or decreased level of cellular toxicity; to change the balance between NHEJ, homology-directed repair, single strand breaks, double strand breaks, etc.).

[0636] In some embodiments, the Cas protein is a Cas9 protein derived from S. pyogenes and recognizes the PAM sequence motif NGG, NAG, NGA (Mali et al, Science 2013; 339(6121): 823-826). In some embodiments, the Cas protein is a Cas9 protein derived from S. thermophiles and recognizes the PAM sequence motif NGGNG and/or NNAGAAW (W=A or T) (See, e.g., Horvath et al, Science, 2010; 327(5962): 167-170, and Deveau et al, J Bacteriol 2008; 190(4): 1390-1400). In some embodiments, the Cas protein is a Cas9 protein derived from S. mutans and recognizes the PAM sequence motif NGG and/or NAAR (R=A or G) (See, e.g., Deveau et al, J BACTERIOL 2008; 190(4): 1390-1400). In some embodiments, the Cas protein is a Cas9 protein derived from S. aureus and recognizes the PAM sequence motif NNGRR (R=A or G). In some embodiments, the Cas protein is a Cas9 protein derived from S. aureus and recognizes the PAM sequence motif N GRRT (R=A or G). In some embodiments, the Cas protein is a Cas9 protein derived from S. aureus and recognizes the PAM sequence motif N GRRV (R=A or G). In some embodiments, the Cas protein is a Cas9 protein derived from N. meningitidis and recognizes the PAM sequence motif N GATT or N GCTT (R=A or G, V=A, G or C) (See, e.g., Hou et ah, PNAS 2013, 1-6). In the aforementioned embodiments, N can be any nucleotide residue, e.g., any of A, G, C or T. In some embodiments, the Cas protein is a Cas13a protein derived from Leptotrichia shahii and recognizes the PFS sequence motif of a single 3′ A, U, or C.

[0637] In some embodiments, a polynucleotide encoding a Cas protein is provided. In some embodiments, the polynucleotide encodes a Cas protein that is at least 90% identical to a Cas protein described in International PCT Publication No. WO 2015/071474 or Chylinski et al., RNA Biology 2013 10:5, 727-737. In some embodiments, the polynucleotide encodes a Cas protein that is at least 95%, 96%, 97%, 98%, or 99% identical to a Cas protein described in International PCT Publication No. WO 2015/071474 or Chylinski et al., RNA Biology 2013 10:5, 727-737. In some embodiments, the polynucleotide encodes a Cas protein that is 100% identical to a Cas protein described in International PCT Publication No. WO 2015/071474 or Chylinski et al., RNA Biology 2013 10:5, 727-737.

### Cas Mutants

[0638] In some embodiments, the Cas polypeptides are engineered to alter one or more properties of the Cas polypeptide. For example, in some embodiments, the Cas polypeptide comprises altered enzymatic properties, e.g., altered nuclease activity, (as compared with a naturally occurring or other reference Cas molecule) or altered helicase activity. In some embodiments, an engineered Cas polypeptide can have an alteration that alters its size, e.g., a deletion of amino acid sequence that reduces its size without significant effect on another property of the Cas polypeptide. In some embodiments, an engineered Cas polypeptide comprises an alteration that affects PAM recognition. For example, an engineered Cas polypeptide can be altered to recognize a PAM sequence other than the PAM sequence recognized by the corresponding wild-type Cas protein.

[0639] Cas polypeptides with desired properties can be made in a number of ways, including alteration of a naturally occurring Cas polypeptide or parental Cas polypeptide, to provide a mutant or altered Cas polypeptide having a desired property. For example, one or more mutations can be introduced into the sequence of a parental Cas polypeptide (e.g., a naturally occurring or engineered Cas polypeptide). Such mutations and differences may comprise substitutions (e.g., conservative substitutions or substitutions of non-essential amino acids); insertions; or deletions. In some embodiments, a mutant Cas polypeptide comprises one or more mutations (e.g., at least 1, 2, 3, 4, 5, 10, 15, 20, 30, 40 or 50 mutations) relative to a parental Cas polypeptide.

[0640] In an embodiment, a mutant Cas polypeptide comprises a cleavage property that differs from a naturally occurring Cas polypeptide. In some embodiments, the Cas is a deactivated Cas (dCas) mutant. In such embodiments, the Cas polypeptide does not comprise any intrinsic enzymatic activity and is unable to mediate target nucleic acid cleavage. In such embodiments, the dCas may be fused with a heterologous protein that is capable of modifying the target nucleic acid in a non-cleavage-based manner. For example, in some embodiments, a dCas protein is fused to transcription activator or transcription repressor domains (e.g., the Kruppel associated box (KRAB or SKD); the Mad mSIN3 interaction domain (SID or SID4X); the ERF repressor domain (ERD); the MAX-interacting protein 1 (MXI1); methyl-CpG binding protein 2 (MECP2); etc.). In some such cases, the dCas fusion protein is targeted by the sgRNA to a specific location (i.e., sequence) in the target nucleic acid and exerts locus-specific regulation such as blocking RNA polymerase binding to a promoter (which selectively inhibits transcription activator function), and/or modifying the local chromatin status (e.g., when a fusion sequence is used that modifies the target DNA or modifies a polypeptide associated with the target DNA). In some cases, the changes are transient (e.g., transcription repression or activation). In some cases, the changes are inheritable (e.g., when epigenetic modifications are made to the target DNA or to proteins associated with the target DNA, e.g., nucleosomal histones).

[0641] In some embodiments, the dCas is a dCas13 mutant (Konermann et al., Cell 173 (2018), 665-676). These dCas13 mutants can then be fused to enzymes that modify RNA, including adenosine deaminases (e.g., ADAR1 and ADAR2). Adenosine deaminases convert adenine to inosine, which the translational machinery treats like guanine, thereby creating a functional A→G change in the RNA sequence. In some embodiments, the dCas is a dCas9 mutant.

[0642] In some embodiments, the mutant Cas9 is a Cas9 nickase mutant. Cas9 nickase mutants comprise only one catalytically active domain (either the HNH domain or the RuvC domain). The Cas9 nickase mutants retain DNA binding based on gRNA specificity but are capable of cutting only one strand of DNA resulting in a single-strand break (e.g., a “nick”). In some embodiments, two complementary Cas9 nickase mutants (e.g., one Cas9 nickase mutant with an inactivated RuvC domain, and one Cas9 nickase mutant with an inactivated HNH domain) are expressed in the same cell with two gRNAs corresponding to two respective target sequences; one target sequence on the sense DNA strand, and one on the antisense DNA strand. This dual-nickase system results in staggered double stranded breaks and can increase target specificity, as it is unlikely that two off-target nicks will be generated close enough to generate a double stranded break. In some embodiments, a Cas9 nickase mutant is co-expressed with a nucleic acid repair template to facilitate the incorporation of an exogenous nucleic acid sequence by homology-directed repair.

[0643] In some embodiments, the Cas polypeptides described herein can be engineered to alter the PAM/PFS specificity of the Cas polypeptide. In some embodiments, a mutant Cas polypeptide has a PAM/PFS specificity that is different from the PAM/PFS specificity of the parental Cas polypeptide. For example, a naturally occurring Cas protein can be modified to alter the PAM/PFS sequence that the mutant Cas polypeptide recognizes to decrease off target sites, improve specificity, or eliminate a PAM/PFS recognition requirement. In some embodiments, a Cas protein can be modified to increase the length of the PAM/PFS recognition sequence. In some embodiments, the length of the PAM recognition sequence is at least 4, 5, 6, 7, 8, 9, 10 or 15 amino acids in length. Cas polypeptides that recognize different PAM/PFS sequences and/or have reduced off-target activity can be generated using directed evolution. Exemplary methods and systems that can be used for directed evolution of Cas polypeptides are described, e.g., in Esvelt et al. Nature 2011, 472(7344): 499-503.

[0644] Exemplary Cas mutants are described in International PCT Publication No. WO 2015/161276 and Konermann et al., Cell 173 (2018), 665-676 which are incorporated herein by reference in their entireties.

Guide RNAs (gRNAs)

[0645] The present disclosure provides guide RNAs (gRNAs) that direct a site-directed modifying polypeptide to a specific target nucleic acid sequence. A gRNA comprises a nucleic acid-targeting segment and protein-binding segment. The nucleic acid-targeting segment of a gRNA comprises a nucleotide sequence that is complementary to a sequence in the target nucleic acid sequence. As such, the nucleic acid-targeting segment of a gRNA interacts with a target nucleic acid in a sequence-specific manner via hybridization (i.e., base pairing), and the nucleotide sequence of the nucleic acid-targeting segment determines the location within the target nucleic acid that the gRNA will bind. The nucleic acid-targeting segment of a gRNA can be modified (e.g., by genetic engineering) to hybridize to any desired sequence within a target nucleic acid sequence.

[0646] The protein-binding segment of a guide RNA interacts with a site-directed modifying polypeptide (e.g., a Cas protein) to form a complex. The guide RNA guides the bound polypeptide to a specific nucleotide sequence within target nucleic acid via the above-described nucleic acid-targeting segment. The protein-binding segment of a guide RNA comprises two stretches of nucleotides that are complementary to one another and which form a double stranded RNA duplex.

[0647] In some embodiments, a gRNA comprises two separate RNA molecules. In such embodiments, each of the two RNA molecules comprises a stretch of nucleotides that are complementary to one another such that the complementary nucleotides of the two RNA molecules hybridize to form the double-stranded RNA duplex of the protein-binding segment. In some embodiments, a gRNA comprises a single RNA molecule (sgRNA).

[0648] (i) The specificity of a gRNA for a target locus is mediated by the sequence of the nucleic acid-binding segment, which comprises about 20 nucleotides that are complementary to a target nucleic acid sequence within the target locus. In some embodiments, the corresponding target nucleic acid sequence is approximately 20 nucleotides in length. In some embodiments, the nucleic acid-binding segments of the gRNA sequences of the present disclosure are at least 90% complementary to a target nucleic acid sequence within a target locus. In some embodiments, the nucleic acid-binding segments of the gRNA sequences of the present disclosure are at least 95%, 96%, 97%, 98%, or 99% complementary to a target nucleic acid sequence within a target locus. In some embodiments, the nucleic acid-binding segments of the gRNA sequences of the present disclosure are 100% complementary to a target nucleic acid sequence within a target locus. In some embodiments, the target nucleic acid sequence is an RNA target sequence. In some embodiments, the target nucleic acid sequence is a DNA target sequence. In some embodiments, the target nucleic acid sequence is a DNA target sequence from an endogenous genes including ANKRD11, BCL2L11, BCL3, BCOR, CALM2, CBLB, CHIC2, CTLA4, DHODH, E2F8, EGR2, FLI1, FOXP3, GATA3, GNAS, HAVCR2, IKZF1, IKZF2, IKZF3, LAG3, MAP4K, NFKBIA, NR4A3, NRP1, PBRM1, PCBP1, PDCD1, PELI1, PIK3CD, PPP2R2D, PTPN1, PTPN2, PTPN22, PTPN6, RBM39, RC3H1, SEMA7A, SERPINA3, SETD5, SH2B3, SH2D1A, SMAD2, SOCS1, TANK, TGFBR1, TGFBR2, TIGIT, TNFAIP3, TNIP1, TRAF6, UMPS, WDR6 and ZC3H12A. (See International Publication Nos. WO 2019/178422, WO 2019/178420 and WO 2019/178421, incorporated by reference herein in their entireties.)

[0649] In some embodiments, the gene-regulating system comprises at least one gRNA molecule that comprises a SOCS1-targeting nucleic acid-binding segment (i.e., a SOCS1-targeting gRNA). In some embodiments, the nucleic acid-binding segment of the at least one SOCS1-targeting gRNA molecules binds to a target DNA sequence that is at least 95%, 96%, 97%, 98%, or 99% identical to a DNA sequence encoded by the SOCS1 gene (SEQ ID NO: 1) or the Socs1 gene (SEQ ID NO: 2). In some embodiments, the nucleic acid-binding segment of the at least one SOCS1-targeting gRNA molecule binds to a target DNA sequence that is 100% identical to a DNA sequence encoded by the SOCS1 gene (SEQ ID NO: 1) or the Socs1 gene (SEQ ID NO: 2).

[0650] In some embodiments, the nucleic acid-binding segment of the at least one SOCS1-targeting gRNA molecule binds to a target DNA sequence that is at least 95%, 96%, 97%, 98%, or 99% identical to a DNA sequence defined by a set of genomic coordinates shown in Table 3 or Table 4. In some embodiments, the nucleic acid-binding segment of the at least one SOCS1-targeting gRNA molecules binds to a target DNA sequence that is 100% identical to a DNA sequence defined by a set of genomic coordinates shown in Table 4 or Table 5. In some embodiments, the nucleic acid-binding segment of the at least one SOCS1-targeting gRNA molecules binds to a target DNA sequence that is at least 95%, 96%, 97%, 98%, or 99% identical to one of SEQ ID NOs: 23-200, 56-200 or 56-187. In some embodiments, the nucleic acid-binding segment of the at least one SOCS1-targeting gRNA molecules binds to a target DNA sequence that is 100% identical to one of SEQ ID NOs: 23-200, 56-200 or 56-187. Exemplary SOCS1 target DNA sequences are shown in Tables 26 and 27.

[0651] In some embodiments, the nucleic acid-binding segment of the at least one SOCS-targeting gRNA molecule is encoded by a DNA sequence that is at least 95%, 96%, 97%, 98%, or 99% identical to one of SEQ ID NOs: 23-200, 56-200 or 56-187. In some embodiments, the nucleic acid-binding segment of the at least one SOCS1-targeting gRNA molecules is encoded by a DNA sequence that is 100% identical to one of SEQ ID NOs: 23-200, 56-200 or 56-187. Exemplary DNA sequences encoding the nucleic acid-binding segment of the SOCS-targeting gRNAs are shown in Tables 26 and 27.

TABLE 26
Exemplary human SOCS1 target sequences

| Target | Sequence | SEQ ID |
|---|---|---|
| hSOCS1_gRNA_1 | GCGGCTGCGCGCCGAGCCCG | 56 |
| hSOCS1_gRNA_2 | GGACGCCTGCGGATTCTACT | 57 |
| hSOCS1_gRNA_3 | GGCTGCCATCCAGGTGAAAG | 58 |
| hSOCS1_gRNA_4 | GCGGCTGTCGCGCACCAGGA | 59 |
| hSOCS1_gRNA_5 | TGGACGCCTGCGGATTCTAC | 60 |
| hSOCS1_gRNA_6 | GACGCCTGCGGATTCTACTG | 61 |
| hSOCS1_gRNA_7 | AGTGCTCCAGCAGCTCGAAG | 62 |
| hSOCS1_gRNA_8 | GCCGGCCGCTTTCACCTGGA | 63 |
| hSOCS1_gRNA_9 | AGTAGAATCCGCAGGCGTCC | 64 |
| hSOCS1_gRNA_10 | CGCACCAGGAAGGTGCCCAC | 65 |
| hSOCS1_gRNA_11 | GGCCGGCCTGAAAGTGCACG | 66 |
| hSOCS1_gRNA_12 | TCCGTTCGCACGCCGATTAC | 67 |
| hSOCS1_gRNA_13 | AGCGCGCTCCTGGACGCCTG | 68 |
| hSOCS1_gRNA_14 | CGGCTGCGCGCCGAGCCCGT | 69 |
| hSOCS1_gRNA_15 | ACGCCTGCGGATTCTACTGG | 70 |
| hSOCS1_gRNA_16 | CGAGGCCATCTTCACGCTAA | 71 |
| hSOCS1_gRNA_17 | TCAGGCCGGCCGCTTTCACC | 72 |
| hSOCS1_gRNA_18 | CTTAGCGTGAAGATGGCCTC | 73 |
| hSOCS1_gRNA_19 | GCCGGTAATCGGCGTGCGAA | 74 |
| hSOCS1_gRNA_20 | CTGCATTGTCGGCTGCCACC | 75 |
| hSOCS1_gRNA_21 | GTGCGCCCCGTGCACGCTCA | 76 |
| hSOCS1_gRNA_22 | GCTGTGCCGCCAGCGCATCG | 77 |
| hSOCS1_gRNA_23 | CACGCGGCGCTGGCGCAGCG | 78 |
| hSOCS1_gRNA_24 | GCTCCTGCAGCGGCCGCACG | 79 |
| hSOCS1_gRNA_25 | AGCTCTCGCGGCTGCCATCC | 80 |
| hSOCS1_gRNA_26 | TGGTGCGCGACAGCCGCCAG | 81 |
| hSOCS1_gRNA_27 | GATGGTAGCACACAACCAGG | 82 |
| hSOCS1_gRNA_28 | AGAGGCAGTCGAAGCTCTCG | 83 |
| hSOCS1_gRNA_29 | GCTGGCGGCTGTCGCGCACC | 84 |
| hSOCS1_gRNA_30 | CCGAGGCCATCTTCACGCTA | 85 |
| hSOCS1_gRNA_31 | GGGGCCCCCAGCATGCGGCG | 86 |
| hSOCS1_gRNA_32 | GCTGCTGGAGCACTACGTGG | 87 |
| hSOCS1_gRNA_33 | CGAGCTGCTGGAGCACTACG | 88 |
| hSOCS1_gRNA_34 | CGAAAAAGCAGTTCCGCTGG | 89 |
| hSOCS1_gRNA_35 | GCAGGCGTCCAGGAGCGCGC | 90 |
| hSOCS1_gRNA_36 | GGGGCCCCTGAGCGTGCACG | 91 |
| hSOCS1_gRNA_37 | GCGGCGCCGCGCCGCATGCT | 92 |
| hSOCS1_gRNA_38 | GCACGCGGCGCTGGCGCAGC | 93 |
| hSOCS1_gRNA_39 | TGGGGGCCCCTGAGCGTGCA | 94 |
| hSOCS1_gRNA_40 | CAGGAAGGTGCCCACGGGCT | 95 |
| hSOCSl_gRNA_41 | TGCGCCCCGTGCACGCTCAG | 96 |
| hSOCS1_gRNA_42 | GCCATCCAGGTGAAAGCGGC | 97 |
| hSOCS1_gRNA_43 | CACGCGCGCCAGCGCGCTCC | 98 |
| hSOCS1_gRNA_44 | GGGCCCCCAGTAGAATCCGC | 99 |
| hSOCS1_gRNA_45 | ATCCGCGTGCACTTTCAGGC | 100 |
| hSOCS1_gRNA_46 | CGAGCCCGTGGGCACCTTCC | 101 |
| hSOCS1_gRNA_47 | CCACAGCAGCAGAGCCCCGA | 102 |
| hSOCS1_gRNA_48 | AGCCAGGTTCTCGCGGCCCA | 103 |
| hSOCS1_gRNA_49 | AAAGTGCACGCGGATGCTCG | 104 |
| hSOCS1_gRNA_50 | CTCTTCCTCCTCCTCGCCCG | 105 |
| hSOCS1_gRNA_51 | GCGTGCACGGGGCGCACGAG | 106 |
| hSOCS1_gRNA_52 | AAGTGCACGCGGATGCTCGT | 107 |
| hSOCS1_gRNA_53 | CGTGCGCCCCGTGCACGCTC | 108 |
| hSOCS1_gRNA_54 | GCAGCGGCCGCACGCGGCGC | 109 |
| hSOCS1_gRNA_55 | CCTTAGCGTGAAGATGGCCT | 110 |
| hSOCS1_gRNA_56 | CAGGTTCTCGCGGCCCACGG | ill |
| hSOCS1_gRNA_57 | GCGCACCAGGAAGGTGCCCA | 112 |
| hSOCS1_gRNA_58 | GCTGCCGGTCAAATCTGGAA | 113 |
| hSOCS1_gRNA_59 | CGGCGTGCGAACGGAATGTG | 114 |
| hSOCS1_gRNA_60 | CAGCAGCAGAGCCCCGACGG | 115 |
| hS0CSl_gRNA_61 | GGGCGAAAAAGCAGTTCCGC | 116 |
| hSOCS1_gRNA_62 | CGCACGCGGCGCTGGCGCAG | 117 |
| hSOCS1_gRNA_63 | GGATGCGAGCCAGGTTCTCG | 118 |
| hSOCS1_gRNA_64 | TGGCGGCACAGCTCCTGCAG | 119 |
| hSOCS1_gRNA_65 | GCGCCCGCGGCCGTGCCCCG | 120 |
| hSOCS1_gRNA_66 | GGCGCCGCGCCGCATGCTGG | 121 |
| hSOCS1_gRNA_67 | CGGTGGCCACGATGCGCTGG | 122 |
| hSOCS1_gRNA_68 | TGCTGTGGAGACTGCATTGT | 123 |
| hSOCS1_gRNA_69 | TAGGATGGTAGCACACAACC | 124 |
| hSOCS1_gRNA_70 | GCGGCCGTGCCCCGCGGTCC | 125 |
| hSOCS1_gRNA_71 | GAGCATCCGCGTGCACTTTC | 126 |
| hSOCS1_gRNA_72 | CGCTGCCGGTCAAATCTGGA | 127 |
| hSOCS1_gRNA_73 | CAGCGCATCGTGGCCACCGT | 128 |
| hSOCS1_gRNA_74 | GCGGATGCTCGTGGGTCCCG | 129 |
| hSOCS1_gRNA_75 | CGGCGCCGCGCCGCATGCTG | 130 |
| hSOCS1_gRNA_76 | CGGTCAAATCTGGAAGGGGA | 131 |
| hSOCS1_gRNA_77 | AGGAAGGTTCTGGCCGCCGT | 132 |
| hSOCS1_gRNA_78 | CCACGGTGGCCACGATGCGC | 133 |
| hSOCS1_gRNA_79 | CGCTGCGCCAGCGCCGCGTG | 134 |
| hSOCS1_gRNA_80 | AGGAGCTCAGGTAGTCGCGG | 135 |
| hSOCS1_gRNA_81 | GCAGCGGGGCCCCCAGCATG | 136 |
| hSOCS1_gRNA_82 | GGAAGGAGCTCAGGTAGTCG | 137 |
| hSOCS1_gRNA_83 | TCGCGGAGGACGGGGTTGAG | 138 |
| hSOCS1_gRNA_84 | CGACTGCCTCTTCGAGCTGC | 139 |
| hSOCS1_gRNA_85 | GCGCCGCGTGCGGCCGCTGC | 140 |
| hSOCS1_gRNA_86 | CACCGTGGGCCGCGAGAACC | 141 |
| hSOCS1_gRNA_87 | GTGCCCCGCGGTCCCGGCCC | 142 |
| hSOCS1_gRNA_88 | CTGCCGGTCAAATCTGGAAG | 143 |
| hSOCS1_gRNA_89 | CTTCCCCTTCCAGATTTGAC | 144 |
| hSOCS1_gRNA_90 | CTCAGGTAGTCGCGGAGGAC | 145 |
| hSOCS1_gRNA_91 | CGGGCGCTGCCGGTCAAATC | 146 |
| hSOCS1_gRNA_92 | GGAAGGTTCTGGCCGCCGTC | 147 |
| hSOCS1_gRNA_93 | GCTCAGGTAGTCGCGGAGGA | 148 |
| hSOCS1_gRNA_94 | GCGGAAGTGCGTGTCGCCGG | 149 |
| hSOCS1_gRNA_95 | GGACCGCGGGGCACGGCCGC | 150 |
| hSOCS1_gRNA_96 | GGGACCGCGGGGCACGGCCG | 151 |
| hSOCS1_gRNA_97 | GCGCGTGATGCGCCGGTAAT | 152 |
| hSOCS1_gRNA_98 | TCAGGTAGTCGCGGAGGACG | 153 |
| hSOCS1_gRNA_99 | TGCGGAAGTGCGTGTCGCCG | 154 |
| hSOCS1_gRNA_100 | GGGGCCGGGACCGCGGGGCA | 155 |
| hSOCS1_gRNA_101 | CCGTCGGGGCTCTGCTGCTG | 156 |
| hSOCS1_gRNA_102 | GAAGGTTCTGGCCGCCGTCG | 157 |
| hSOCS1_gRNA_103 | GTGTGCTACCATCCTACAGA | 158 |
| hSOCS1_gRNA_104 | GTCGCGGAGGACGGGGTTGA | 159 |
| hSOCS1_gRNA_105 | CGCTGGCGCGCGTGATGCGC | 160 |
| hSOCS1_gRNA_106 | GCGTGCACGGCGGGCGCTGC | 161 |
| hSOCS1_gRNA_107 | TCTGGAAGGGGAAGGAGCTC | 162 |
| hSOCS1_gRNA_108 | GTGCGTGTCGCCGGGGGCCG | 163 |
| hSOCS1_gRNA_109 | GGGCACGGCCGCGGGCGCGC | 164 |
| hSOCS1_gRNA_110 | GTTAATGCTGCGTGCACGGC | 165 |
| hSOCS1_gRNA_111 | GCACGGCCGCGGGCGCGCGG | 166 |
| hSOCS1_gRNA_112 | GGGGCACGGCCGCGGGCGCG | 167 |
| hSOCS1_gRNA_113 | GTGCGGAAGTGCGTGTCGCC | 168 |
| hSOCS1_gRNA_114 | GAGGAAGAGGAGGAAGGTTC | 169 |
| hSOCS1_gRNA_115 | GGCTGGCCCCTTCTGTAGGA | 170 |
| hSOCS1_gRNA_116 | GGGGCCGGGGCCGGGACCGC | 171 |
| hSOCS1_gRNA_117 | CGCGGAGGACGGGGTTGAGG | 172 |
| hSOCS1_gRNA_118 | TTTCGCCCTTAGCGTGAAGA | 173 |
| hSOCS1_gRNA_119 | GGCACGGCCGCGGGCGCGCG | 174 |
| hSOCS1_gRNA_120 | AGTCGCGGAGGACGGGGTTG | 175 |
| hSOCS1_gRNA_121 | GGGCCGGGGCCGGGACCGCG | 176 |
| hSOCS1_gRNA_122 | AAGTGCGTGTCGCCGGGGGC | 177 |
| hSOCS1_gRNA_123 | CTCCGGCTGGCCCCTTCTGT | 178 |
| hSOCS1_gRNA_124 | GGCGGCGCCGCGCCGCATGC | 179 |
| hSOCS1_gRNA_125 | AGTGCGTGTCGCCGGGGGCC | 180 |
| hSOCS1_gRNA_126 | TGTGCGGAAGTGCGTGTCGC | 181 |
| hSOCS1_gRNA_127 | GTGTCGCCGGGGGCCGGGGC | 182 |
| hSOCS1_gRNA_128 | TGTCGCCGGGGGCCGGGGCC | 183 |
| hSOCS1_gRNA_129 | GCGGTCCCGGCCCCGGCCCC | 184 |
| hSOCS1_gRNA_130 | CGCGGGGGCCGCGGGCGAGG | 185 |
| hSOCS1_gRNA_131 | CGCGGGCGAGGAGGAGGAAG | 186 |
| hSOCS1_gRNA_132 | GGGCGAGGAGGAGGAAGAGG | 187 |

TABLE 27
Exemplary murine Socs1 target sequences

| Target | Sequence | SEQ ID |
|---|---|---|
| mSocs1_gRNA_1 | GAAGTGCACGCGGATGCTCG | 188 |
| mSocs1_gRNA_2 | AGTGCTCCAGCAGCTCGAAA | 189 |
| mSocs1_gRNA_3 | GCCGGCCGCTTCCACTTGGA | 190 |
| mSocs1_gRNA_4 | GCTGTGTCGCCAGCGCATCG | 191 |
| mSocs1_gRNA_5 | GCGACTGTCGCGCACCAAGA | 192 |
| mSocs1_gRNA_6 | GCGTGCACGGGGCGCACGAG | 193 |
| mSocs1_gRNA_7 | TCACGGAGTACCGGGTTAAG | 194 |
| mSocs1_gRNA_8 | GGACGCCTGCGGCTTCTATT | 195 |
| mSocs1_gRNA_9 | GCGCGAAGAAGCAGTTCCGT | 196 |
| mSocs1_gRNA_10 | GCTCAGCGTGAAGATGGCTT | 197 |
| mSocs1_gRNA_11 | CGAGCCCGTGGGCACCTTCT | 198 |
| mSocs1_gRNA_12 | ATCCGCGTGCACTTCCAGGC | 199 |
| mSocs1_gRNA_13 | CGCCAGGTTCTCGCGACCCA | 200 |

[0652] In some embodiments, the gene-regulating system comprises at least one gRNA molecule that comprises a PTPN2-targeting nucleic acid-binding segment (i.e., a PTPN2-targeting gRNA). In some embodiments, the nucleic acid-binding segment of the at least one PTPN2-targeting gRNA molecules binds to a target DNA sequence that is at least 95%, 96%, 97%, 98%, or 99% identical to a DNA sequence encoded by the PTPN2 gene (SEQ ID NO: 3) or the Ptpn2 gene (SEQ ID NO: 4). In some embodiments, the nucleic acid-binding segment of the at least one PTPN2-targeting gRNA molecules binds to a target DNA sequence that is 100% identical to a DNA sequence encoded by the PTPN2 gene (SEQ ID NO: 3) or the Ptpn2 gene (SEQ ID NO: 4).

[0653] In some embodiments, the nucleic acid-binding segment of the at least one PTPN2-targeting gRNA molecule binds to a target DNA sequence that is at least 95%, 96%, 97%, 98%, or 99% identical to a DNA sequence defined by a set of genomic coordinates shown in Table 9 or Table 10. In some embodiments, the nucleic acid-binding segment of the at least one PTPN2-targeting gRNA molecules binds to a target DNA sequence that is 100% identical to a DNA sequence defined by a set of genomic coordinates shown in Table 9 or Table 10. In some embodiments, the nucleic acid-binding segment of the at least one PTPN2-targeting gRNA molecules binds to a target DNA sequence that is at least 95%, 96%, 97%, 98%, or 99% identical to one of SEQ ID NOs: 201-327 or 201-314. In some embodiments, the nucleic acid-binding segment of the at least one PTPN2-targeting gRNA molecules binds to a target DNA sequence that is 100% identical to one of SEQ ID NOs: 201-327 or 201-314. Exemplary PTPN2/Ptpn2 target DNA sequences are shown in Tables 28 and 29.

[0654] In some embodiments, the nucleic acid-binding segment of the at least one PTPN2-targeting gRNA molecule is encoded by a DNA sequence that is at least 95%, 96%, 97%, 98%, or 99% identical to one of SEQ ID NOs: 201-327 or 201-314. In some embodiments, the nucleic acid-binding segment of the at least one PTPN2-targeting gRNA molecules is encoded by a DNA sequence that is 100% identical to one of SEQ ID NOs: 201-327 or 201-314. In some embodiments, the nucleic acid-binding segment of the at least one PTPN2-targeting gRNA molecules is encoded by a DNA sequence that is at least 95%, 96%, 97%, 98%, or 99% identical to one of SEQ ID NOs: 201-327 or 201-314. In some embodiments, the nucleic acid-binding segment of the at least one PTPN2-targeting gRNA molecules is encoded by a DNA sequence that is 100% identical to one of SEQ ID NOs: 201-327 or 201-314. Exemplary DNA sequences encoding the nucleic acid-binding segment of the PTPN2-targeting gRNAs are shown in Tables 28 and 29.

TABLE 28
Exemplary human PTPN2 gRNA sequences

| Target | Sequence | SEQ ID |
|---|---|---|
| hPTPN2_gRNA_1 | CCATGCCCACCACCATCGAG | 201 |
| hPTPN2_gRNA_2 | TCTACGGAAACGTATTCGAG | 202 |
| hPTPN2_gRNA_3 | TTTAGTATATTGAGAACTTG | 203 |
| hPTPN2_gRNA_4 | GCACTACAGTGGATCACCGC | 204 |
| hPTPN2_gRNA_5 | TGTCATGCTGAACCGCATTG | 205 |
| hPTPN2_gRNA_6 | GGAAACTTGGCCACTCTATG | 206 |
| hPTPN2_gRNA_7 | GTATTTGAAATTATTAATGC | 207 |
| hPTPN2_gRNA_8 | CAGTTTAGTTGACATAGAAG | 208 |
| hPTPN2_gRNA_9 | GGGTCTGAATAAGACCCATT | 209 |
| hPTPN2_gRNA_10 | CCATGACTATCCTCATAGAG | 210 |
| hPTPN2_gRNA_11 | CCATGACTATCCTCATAGAG | 211 |
| hPTPN2_gRNA_12 | CTCTTCGAACTCCCGCTCGA | 212 |
| hPTPN2_gRNA_13 | GAACCCTGACCATGGGCCTG | 213 |
| hPTPN2_gRNA_14 | GCTCCTTGAACCCTGACCAT | 214 |
| hPTPN2_gRNA_15 | AGTTGGATACTCAGCGTCGC | 215 |
| hPTPN2_gRNA_16 | CCGCTCGATGGTGGTGGGCA | 216 |
| hPTPN2_gRNA_17 | CAGAAATGGCAGCATGTGTT | 217 |
| hPTPN2_gRNA_18 | GCACTACAGTGGATCACCGC | 218 |
| hPTPN2_gRNA_19 | GGTAGACACTTGTCTTGTTT | 219 |
| hPTPN2_gRNA_20 | TGGCAGCATGTGTTAGGAAG | 220 |
| hPTPN2_gRNA_21 | AGGCCCATGGTCAGGGTTCA | 221 |
| hPTPN2_gRNA_22 | GTTCAGCATGACAACTGCTT | 222 |
| hPTPN2_gRNA_23 | CAATGGAGGAGAACAGTGAG | 223 |
| hPTPN2_gRNA_24 | CTCTTCTATGTCAACTAAAC | 224 |
| hPTPN2_gRNA_25 | AGTGGATCACCGCAGGCCCA | 225 |
| hPTPN2_gRNA_26 | CTGACAGGTGACCGATGTAC | 226 |
| hPTPN2_gRNA_27 | AACTCCCGCTCGATGGTGGT | 227 |
| hPTPN2_gRNA_28 | GTCTCCCTGATCCATCCAGT | 228 |
| hPTPN2_gRNA_29 | TAGAGGAAAGTCCTGTACAT | 229 |
| hPTPN2_gRNA_30 | ATGTATGGAAAGGATGGTAA | 230 |
| hPTPN2_gRNA_31 | GCCCAATGCCTGCACTACAG | 231 |
| hPTPN2_gRNA_32 | CGAGCGGGAGTTCGAAGAGT | 232 |
| hPTPN2_gRNA_33 | TCACCGCAGGCCCATGGTCA | 233 |
| hPTPN2_gRNA_34 | CAGTTTAGTTGACATAGAAG | 234 |
| hPTPN2_gRNA_35 | CCATGCCCACCACCATCGAG | 235 |
| hPTPN2_gRNA_36 | GCCAAACCATAAGCCAGAAA | 236 |
| hPTPN2_gRNA_37 | CCGATTCTTTCTCCACAATG | 237 |
| hPTPN2_gRNA_38 | TTCGAACTCCCGCTCGATGG | 238 |
| hPTPN2_gRNA_39 | AGTGCAGGCATTGGGCGCTC | 239 |
| hPTPN2_gRNA_40 | GGAAACTTGGCCACTCTATG | 240 |
| hPTPN2_gRNA_41 | ATCCACTGTAGTGCAGGCAT | 241 |
| hPTPN2_gRNA_42 | CACTCTATGAGGATAGTCAT | 242 |
| hPTPN2_gRNA_43 | CCACTCTATGAGGATAGTCA | 243 |
| hPTPN2_gRNA_44 | TCCACTGTAGTGCAGGCATT | 244 |
| hPTPN2_gRNA_45 | AAGTTCTTTCCATCGTTTCT | 245 |
| hPTPN2_gRNA_46 | TCGCTGGCAGCCGCTGTACT | 246 |
| hPTPN2_gRNA_47 | GAACTCCCGCTCGATGGTGG | 247 |
| hPTPN2_gRNA_48 | AGGATGGTAAAGGCACCAAC | 248 |
| hPTPN2_gRNA_49 | AAAGGGAGATTCTAGTATAC | 249 |
| hPTPN2_gRNA_50 | AGAATTTAGGATGTATGGAA | 250 |
| hPTPN2_gRNA_51 | GGGTCTGAATAAGACCCATT | 251 |
| hPTPN2_gRNA_52 | GGCACCAACTGGATGGATCA | 252 |
| hPTPN2_gRNA_53 | CTCTAAAATGCAAGATACAA | 253 |
| hPTPN2_gRNA_54 | GTATTTGAAATTATTAATGC | 254 |
| hPTPN2_gRNA_55 | CCTTTCTTGCAGATGGAAAA | 255 |
| hPTPN2_gRNA_56 | CTGCACCTTCTGAGCTGTGG | 256 |
| hPTPN2_gRNA_57 | ATGCTGCCATTTCTGGCTTA | 257 |
| hPTPN2_gRNA_58 | TTTCTTTAAACAGCATCTCT | 258 |
| hPTPN2_gRNA_59 | AGACATGGAATGCAGAATGC | 259 |
| hPTPN2_gRNA_60 | AGGCACCAACTGGATGGATC | 260 |
| hPTPN2_gRNA_61 | TAATGACTGAAAAATACAAT | 261 |
| hPTPN2_gRNA_62 | GAATGCAGAATGCAGGAAAT | 262 |
| hPTPN2_gRNA_63 | TTTAGGATGTATGGAAAGGA | 263 |
| hPTPN2_gRNA_64 | CTAACACATGCTGCCATTTC | 264 |
| hPTPN2_gRNA_65 | TCATACATGGCTATAATAGA | 265 |
| hPTPN2_gRNA_66 | ACGATGGAAAGAACTTTCTA | 266 |
| hPTPN2_gRNA_67 | ACGTATTCGAGAGGACAGAA | 267 |
| hPTPN2_gRNA_68 | GCGGTGATCCACTGTAGTGC | 268 |
| hPTPN2_gRNA_69 | TATTAATGCTGGATGTTAAA | 269 |
| hPTPN2_gRNA_70 | GAGATGCTGTTTAAAGAAAC | 270 |
| hPTPN2_gRNA_71 | CAGCAAGAATTTAGGATGTA | 271 |
| hPTPN2_gRNA_72 | TTGACATAGAAGAGGCACAA | 272 |
| hPTPN2_gRNA_73 | GATTCAGGGACTCCAAAATC | 273 |
| hPTPN2_gRNA_74 | CTCACTTTCATTATACTACC | 274 |
| hPTPN2_gRNA_75 | TTTAGTATATTGAGAACTTG | 275 |
| hPTPN2_gRNA_76 | AGGGACTCCAAAATCTGGCC | 276 |
| hPTPN2_gRNA_77 | AGGTTAAATGTGCACAGTAC | 277 |
| hPTPN2_gRNA_78 | ATCACCGCAGGCCCATGGTC | 278 |
| hPTPN2_gRNA_79 | AGCATCTCTTGGTCATCTGT | 279 |
| hPTPN2_gRNA_80 | GAAGGAGCAAAATGTATAAA | 280 |
| hPTPN2_gRNA_81 | GCCATTTCTGGCTTATGGTT | 281 |
| hPTPN2_gRNA_82 | CTGGATGGATCAGGGAGACA | 282 |
| hPTPN2_gRNA_83 | AAATACAATGGGAACAGAAT | 283 |
| hPTPN2_gRNA_84 | ATAATGACTGAAAAATACAA | 284 |
| hPTPN2_gRNA_85 | CATGCCCACCACCATCGAGC | 285 |
| hPTPN2_gRNA_86 | AACATGAGAAAATACCGAAT | 286 |
| hPTPN2_gRNA_87 | AGAAATGAAGCTGGTGATTC | 287 |
| hPTPN2_gRNA_88 | CCGCATTGTGGAGAAAGAAT | 288 |
| hPTPN2_gRNA_89 | GAAATGAAGCTGGTGATTCA | 289 |
| hPTPN2_gRNA_90 | TTGTTTAAAGTGAGAGAATC | 290 |
| hPTPN2_gRNA_91 | CCGCGACTCACCAAGTACAG | 291 |
| hPTPN2_gRNA_92 | GAACATGAGAAAATACCGAA | 292 |
| hPTPN2_gRNA_93 | TATACTACCTGGCCAGATTT | 293 |
| hPTPN2_gRNA_94 | TATGAGAATCTCAGTTGATC | 294 |
| hPTPN2_gRNA_95 | TCAACTGAGATTCTCATACA | 295 |
| hPTPN2_gRNA_96 | TGAGAATCTCAGTTGATCTG | 296 |
| hPTPN2_gRNA_97 | ATGAGAATCTCAGTTGATCT | 297 |
| hPTPN2_gRNA_98 | TGGTAAAGGCACCAACTGGA | 298 |
| hPTPN2_gRNA_99 | TGTCATGCTGAACCGCATTG | 299 |
| hPTPN2_gRNA_100 | TTTGGTGAATGATCAAAGGC | 300 |
| hPTPN2_gRNA_101 | ATGAAAGTGAGATATTGTTC | 301 |
| hPTPN2_gRNA_102 | TATTTCCTCATAGTGCTCTA | 302 |
| hPTPN2_gRNA_103 | AGAAGGAGCAAAATGTATAA | 303 |
| hPTPN2_gRNA_104 | TTTGTTTGGTGAATGATCAA | 304 |
| hPTPN2_gRNA_105 | TCTACGGAAACGTATTCGAG | 305 |
| hPTPN2_gRNA_106 | AAAGGCCACCACAGCTCAGA | 306 |
| hPTPN2_gRNA_107 | AGGTGCAGCAGATGAAACAG | 307 |
| hPTPN2_gRNA_108 | GGCTCCTTGAACCCTGACCA | 308 |
| hPTPN2_gRNA_109 | AAGGAGTTACATCTTAACAC | 309 |
| hPTPN2_gRNA_110 | TAAAATGCAAGATACAATGG | 310 |
| hPTPN2_gRNA_111 | ACAAGTGTCTACCAGAGAGA | 311 |
| hPTPN2_gRNA_112 | GCGCTCTGGCACCTTCTCTC | 312 |
| hPTPN2_gRNA_113 | CTGCTGCACCTTCTGAGCTG | 313 |
| hPTPN2_gRNA_114 | TCTTCCCTACCTAGAAACGA | 314 |

TABLE 29
Exemplary murine Ptpn2 gRNA sequences

| Target | Sequence | SEQ ID |
|---|---|---|
| mPTPN2_gRNA_1 | AATCTGGCCAGGTGGTATAA | 315 |
| mPTPN2_gRNA_2 | AATATGAGAAAGTATCGAAT | 316 |
| mPTPN2_gRNA_3 | ATCACTGCAGGTCCATGGTC | 317 |
| mPTPN2_gRNA_4 | ATGTGCACAGTACTGGCCAA | 318 |
| mPTPN2_gRNA_5 | GGCAGCATGTGTTCGGAAGT | 319 |
| mPTPN2_gRNA_6 | AAGAAGTTTAGAAATGAAGC | 320 |
| mPTPN2_gRNA_7 | GCCACACCATGAGCCAGAAA | 321 |
| mPTPN2_gRNA_8 | CCTTTCTTGCAGATGGAAAA | 322 |
| mPTPN2_gRNA_9 | GTACTTTGCTCCTTCTATTA | 323 |
| mPTPN2_gRNA_10 | AGAAATGAAGCTGGTGACTC | 324 |
| mPTPN2_gRNA_11 | GTTTAGCATGACAACTGCTT | 325 |
| mPTPN2_gRNA_12 | GCCCGATGCCCGCACTGCAA | 326 |
| mPTPN2_gRNA_13 | TGACAGAGAAATGGTGTTTA | 327 |

[0655] In some embodiments, the gene-regulating system comprises at least one gRNA molecule that comprises a ZC3H12A-targeting nucleic acid-binding segment (i.e., a ZC3H12A-targeting gRNA). In some embodiments, the nucleic acid-binding segment of the at least one ZC3H12A-targeting gRNA molecules binds to a target DNA sequence that is at least 95%, 96%, 97%, 98%, or 99% identical to a DNA sequence encoded by the ZC3H12A gene (SEQ ID NO: 5) or the Zc3h12a gene (SEQ ID NO: 6). In some embodiments, the nucleic acid-binding segment of the at least one ZC3H12A-targeting gRNA molecules binds to a target DNA sequence that is 100% identical to a DNA sequence encoded by the ZC3H12A gene (SEQ ID NO: 5) or the Zc3h12a gene (SEQ ID NO: 6).

[0656] In some embodiments, the nucleic acid-binding segment of the at least one ZC3H12A-targeting gRNA molecule binds to a target DNA sequence that is at least 95%, 96%, 97%, 98%, or 99% identical to a DNA sequence defined by a set of genomic coordinates shown in Table 11 or Table 12. In some embodiments, the nucleic acid-binding segment of the at least one ZC3H12A-targeting gRNA molecules binds to a target DNA sequence that is 100% identical to a DNA sequence defined by a set of genomic coordinates shown in Table 11 or Table 12. In some embodiments, the nucleic acid-binding segment of the at least one ZC3H12A-targeting gRNA molecules binds to a target DNA sequence that is at least 95%, 96%, 97%, 98%, or 99% identical to one of SEQ ID NOs: 331-797, 338-797 or 338-789. In some embodiments, the nucleic acid-binding segment of the at least one ZC3H12A-targeting gRNA molecules binds to a target DNA sequence that is 100% identical to one of SEQ ID NOs: 331-797, 338-797 or 338-789. Exemplary ZC3H12A target DNA sequences are shown in Tables 30 and 31.

[0657] In some embodiments, the nucleic acid-binding segment of the at least one ZC3H12A-targeting gRNA molecule is encoded by a DNA sequence that is at least 95%, 96%, 97%, 98%, or 99% identical to one of SEQ ID NOs: 331-797, 338-797 or 338-789. In some embodiments, the nucleic acid-binding segment of the at least one ZC3H12A-targeting gRNA molecules is encoded by a DNA sequence that is 100% identical to one of SEQ ID NOs: 331-797, 338-797 or 338-789. Exemplary DNA sequences encoding the nucleic acid-binding segment of the ZC3H12A/Zc3h12a-targeting gRNAs are shown in Tables 30 and 31.

TABLE 30
Exemplary human ZC3H12A gRNA sequences

| Target | Sequence | SEQ ID |
|---|---|---|
| hZC3H12A_gRNA_1 | AAGCTGGCCTACGAGTCTGA | 338 |
| hZC3H12A_gRNA_2 | GCGGGACTAGAGGGAGCTGA | 339 |
| hZC3H12A_gRNA_3 | CAGCTCCCTCTAGTCCCGCG | 340 |
| hZC3H12A_gRNA_4 | CAGGACGCTGTGGATCTCCG | 341 |
| hZC3H12A_gRNA_5 | AACATACTTGTCATTGACGA | 342 |
| hZC3H12A_gRNA_6 | CTCACCTGTGATGGGCACGT | 343 |
| hZC3H12A_gRNA_7 | AACACGGGACAGCCACCGAG | 344 |
| hZC3H12A_gRNA_8 | CGACAGATTCATTGTGAAGC | 345 |
| hZC3H12A_gRNA_9 | ACACCATCACGACGCGTGGG | 346 |
| hZC3H12A_gRNA_10 | TCCCAGCCATGGGAACAAGG | 347 |
| hZC3H12A_gRNA_11 | GGAGTGGAAGCGCTTCATCG | 348 |
| hZC3H12A_gRNA_12 | TTAGGGGTGCCACCACCCCG | 349 |
| hZC3H12A_gRNA_13 | GACACATACCGTGACCTCCA | 350 |
| hZC3H12A_gRNA_14 | CCGGCCCAGTGGGTCATCAG | 351 |
| hZC3H12A_gRNA_15 | CCTGGAACTGCAGATGAAGG | 352 |
| hZC3H12A_gRNA_16 | GTCCTCTCCCTCCCAGCCAT | 353 |
| hZC3H12A_gRNA_17 | TCCCCAGGGTCCCGCCAAGA | 354 |
| hZC3H12A_gRNA_18 | AGTGAGCAGTGCAGCCTGGA | 355 |
| hZC3H12A_gRNA_19 | TGTCCTCTCCCTCCCAGCCA | 356 |
| hZC3H12A_gRNA_20 | CTGGACTGGGATGAAGGTGA | 357 |
| hZC3H12A_gRNA_21 | GGGGTGGGCCCGGCTCACCA | 358 |
| hZC3H12A_gRNA_22 | CACCACCCCGCGGGACTAGA | 359 |
| hZC3H12A_gRNA_23 | CTGCTGCCACTGCCCCCGCT | 360 |
| hZC3H12A_gRNA_24 | CGGCCCGACGTGCCCATCAC | 361 |
| hZC3H12A_gRNA_25 | CACTGCCCCCGCTAGGTGCG | 362 |
| hZC3H12A_gRNA_26 | ATACACGCTGGCCTGCTCCT | 363 |
| hZC3H12A_gRNA_27 | CAAACACTGTGATGTCTGTG | 364 |
| hZC3H12A_gRNA_28 | GCGGGACCCTGGGGATGCCT | 365 |
| hZC3H12A_gRNA_29 | GCGGGAGCGCCAGACCTCAC | 366 |
| hZC3H12A_gRNA_30 | AGGACAGGCTTCTCTCCACA | 367 |
| hZC3H12A_gRNA_31 | GCAGACACCAACACGGTGCT | 368 |
| hZC3H12A_gRNA_32 | CCACCACCCCGCGGGACTAG | 369 |
| hZC3H12A_gRNA_33 | ATCCCCAGGGTCCCGCCAAG | 370 |
| hZC3H12A_gRNA_34 | CCTGGAGGAAGGAGCAGCCT | 371 |
| hZC3H12A_gRNA_35 | AGAGCCAGATGTCGGAACTT | 372 |
| hZC3H12A_gRNA_36 | ATGACCCACTGGGCCGGCAC | 373 |
| hZC3H12A_gRNA_37 | GCAGCTTTGGGCCCACAGAC | 374 |
| hZC3H12A_gRNA_38 | ACTCTCTGTTAGCAGAGAGC | 375 |
| hZC3H12A_gRNA_39 | CCAGGAAGGAAATGCACCTA | 376 |
| hZC3H12A_gRNA_40 | AGGCACCACTCACCTGTGAT | 377 |
| hZC3H12A_gRNA_41 | CTGGGCCCGTGCCGGCCCAG | 378 |
| hZC3H12A_gRNA_42 | CAGCCAGCTGCTGGGGGTCC | 379 |
| hZC3H12A_gRNA_43 | TCCACTCCTGCCGCTCGCCT | 380 |
| hZC3H12A_gRNA_44 | CGTCCAGGCAGACACCAACA | 381 |
| hZC3H12A_gRNA_45 | CCCACCCACATCAGTCCTTC | 382 |
| hZC3H12A_gRNA_46 | GCCAGCTCTTGACCCGGCCT | 383 |
| hZC3H12A_gRNA_47 | CTGCCCTCCTTTTCCTCTTC | 384 |
| hZC3H12A_gRNA_48 | CCAGCCCCACCATGAGTCTG | 385 |
| hZC3H12A_gRNA_49 | GCCGATTCTTCCACCCAGAG | 386 |
| hZC3H12A_gRNA_50 | CTCCCAGAAGAGGAAAAGGA | 387 |
| hZC3H12A_gRNA_51 | GTGGGGCAGGGCAGGCAGCC | 388 |
| hZC3H12A_gRNA_52 | GGGTCAAGAGCTGGCCGCTG | 389 |
| hZC3H12A_gRNA_53 | ATGCCCCCTGATGACCCACT | 390 |
| hZC3H12A_gRNA_54 | AGCCTTCTCTGCCTTTGGCC | 391 |
| hZC3H12A_gRNA_55 | CTCTGCCTTTGGCCGGGCCA | 392 |
| hZC3H12A_gRNA_56 | GGAACCCAGCCTGCCCTCCC | 393 |
| hZC3H12A_gRNA_57 | GGCAGGAGCCTCGCACCTAG | 394 |
| hZC3H12A_gRNA_58 | TCCCAGACCAGCACATCCTG | 395 |
| hZC3H12A_gRNA_59 | GTGAGCAGTGCAGCCTGGAT | 396 |
| hZC3H12A_gRNA_60 | GAGCCAGATGTCGGAACTTT | 397 |
| hZC3H12A_gRNA_61 | GGCCGATGGCAAGCCTTGCT | 398 |
| hZC3H12A_gRNA_62 | AGGAGCCTCGCACCTAGCGG | 399 |
| hZC3H12A_gRNA_63 | AGGTCCCCAAGAGGAAAACA | 400 |
| hZC3H12A_gRNA_64 | CGCTGAGGAGGCCTCGGCCC | 401 |
| hZC3H12A_gRNA_65 | GAGGACAGCCACAGCCGTCA | 402 |
| hZC3H12A_gRNA_66 | CAGCCCCACCATGAGTCTGT | 403 |
| hZC3H12A_gRNA_67 | ACCCCCCAGAGCCCCAAGCA | 404 |
| hZC3H12A_gRNA_68 | GAGGCACCACTCACCTGTGA | 405 |
| hZC3H12A_gRNA_69 | CCAAGAGGAAAACAGGGCAC | 406 |
| hZC3H12A_gRNA_70 | GTACGTCTCCCAGGATTGCC | 407 |
| hZC3H12A_gRNA_71 | CACAGCCTCCACCAGGTGCG | 408 |
| hZC3H12A_gRNA_72 | GATCTCGGCAGCCAGCTGCT | 409 |
| hZC3H12A_gRNA_73 | CAGCCTTCTCTGCCTTTGGC | 410 |
| hZC3H12A_gRNA_74 | CAGAAGTGACACTTACCTCA | 411 |
| hZC3H12A_gRNA_75 | GCTGGCCGCTGAGGAGGCCT | 412 |
| hZC3H12A_gRNA_76 | CAGCTCCCTCTAGTCCCGCG | 413 |
| hZC3H12A_gRNA_77 | CGGGGTGGGCCCGGCTCACC | 414 |
| hZC3H12A_gRNA_78 | GACACATACCGTGACCTCCA | 415 |
| hZC3H12A_gRNA_79 | CAGGAAGGAAATGCACCTAT | 416 |
| hZC3H12A_gRNA_80 | AGTGGCCAGCACCCATGGCC | 417 |
| hZC3H12A_gRNA_81 | CTCTCCTATTCTTCCCAGCA | 418 |
| hZC3H12A_gRNA_82 | GCCCGAGTCCAGGCAATCCT | 419 |
| hZC3H12A_gRNA_83 | CACCTTCATCTGCAGTTCCA | 420 |
| hZC3H12A_gRNA_84 | GGCACAGGCAGACAGGTGAG | 421 |
| hZC3H12A_gRNA_85 | AGCACCCATGGCCCGGCCAA | 422 |
| hZC3H12A_gRNA_86 | CCACAGGCAGCTTACTCACT | 423 |
| hZC3H12A_gRNA_87 | TTCCTGTGCTCCAAAGTGAG | 424 |
| hZC3H12A_gRNA_88 | ACCGCAGCCTTCTCTGCCTT | 425 |
| hZC3H12A_gRNA_89 | GGGAGCCAATGCCCGAGTCC | 426 |
| hZC3H12A_gRNA_90 | TTCCCAGCAAGGCTTGCCAT | 427 |
| hZC3H12A_gRNA_91 | AGCCAGATGTCGGAACTTTG | 428 |
| hZC3H12A_gRNA_92 | TACACGGGCTACAGTCCCTA | 429 |
| hZC3H12A_gRNA_93 | TCTGTGTTAGACCCTCTTGG | 430 |
| hZC3H12A_gRNA_94 | AAGCTGCCCCCAGCGCTCTG | 431 |
| hZC3H12A_gRNA_95 | CTTTGGGGGGTTCGAGGAGG | 432 |
| hZC3H12A_gRNA_96 | GGGCCGATGGCAAGCCTTGC | 433 |
| hZC3H12A_gRNA_97 | CACAGGCAGCTTACTCACTG | 434 |
| hZC3H12A_gRNA_98 | CCCAGACCAGCACATCCTGC | 435 |
| hZC3H12A_gRNA_99 | AGGCTGGGTTCCATACCATA | 436 |
| hZC3H12A_gRNA_100 | GGACTTCTAATTGCTGAGAA | 437 |
| hZC3H12A_gRNA_101 | CTCAAATTCCCACAGACTCA | 438 |
| hZC3H12A_gRNA_102 | AAAACAGGGCACAGGCAGAC | 439 |
| hZC3H12A_gRNA_103 | CCAGATGTCGGAACTTTGGG | 440 |
| hZC3H12A_gRNA_104 | CTCCCTCTAGTCCCGCGGGG | 441 |
| hZC3H12A_gRNA_105 | AGCCCCCAGTGCAGAGCCCA | 442 |
| hZC3H12A_gRNA_106 | CCTGGACGCCCAGCTTCTGC | 443 |
| hZC3H12A_gRNA_107 | CAGGGGCTGGCAGGAGCCCG | 444 |
| hZC3H12A_gRNA_108 | CCTTGTTCCCATGGCTGGGA | 445 |
| hZC3H12A_gRNA_109 | CTCATCTGCCACAGAGCGCT | 446 |
| hZC3H12A_gRNA_110 | GGCAGACACCAACACGGTGC | 447 |
| hZC3H12A_gRNA_111 | TCCCTCTTGATTCCTCTTCC | 448 |
| hZC3H12A_gRNA_112 | CCCTCCCAGCCATGGGAACA | 449 |
| hZC3H12A_gRNA_113 | GCGTAAGAAGCCACTCACTT | 450 |
| hZC3H12A_gRNA_114 | TGTGTTTCCCCCGCACCTGG | 451 |
| hZC3H12A_gRNA_115 | CTGAGACCAGTGGTCATCGA | 452 |
| hZC3H12A_gRNA_116 | GGGCAGCGACCTGAGACCAG | 453 |
| hZC3H12A_gRNA_117 | AGCAATTAGAAGTCCCTGCA | 454 |
| hZC3H12A_gRNA_118 | TGGGTGAGCTGGTGAAACAC | 455 |
| hZC3H12A_gRNA_119 | CTGTTAGCAGAGAGCTGGAC | 456 |
| hZC3H12A_gRNA_120 | CCCCTGATGACCCACTGGGC | 457 |
| hZC3H12A_gRNA_121 | GTTCACACCATCACGACGCG | 458 |
| hZC3H12A_gRNA_122 | TGTCCAGGCTGGGCCCGTGC | 459 |
| hZC3H12A_gRNA_123 | ACACAGACCTATGCCCCATC | 460 |
| hZC3H12A_gRNA_124 | GGCTGCCTGCCCTGCCCCAC | 461 |
| hZC3H12A_gRNA_125 | CCATAGGTGCATTTCCTTCC | 462 |
| hZC3H12A_gRNA_126 | CAGGCTGGGTTCCATACCAT | 463 |
| hZC3H12A_gRNA_127 | GCCCCATCACAGCCTCCACC | 464 |
| hZC3H12A_gRNA_128 | TGCCCTCCTTTTCCTCTTCT | 465 |
| hZC3H12A_gRNA_129 | GCCAGATGTCGGAACTTTGG | 466 |
| hZC3H12A_gRNA_130 | CAGGCAGACAGGTGAGAGGA | 467 |
| hZC3H12A_gRNA_131 | CCAGGAGTCTGAGCTATGAG | 468 |
| hZC3H12A_gRNA_132 | GCTCCAGGTTGGGAGCCTTA | 469 |
| hZC3H12A_gRNA_133 | CTCACCTGTGATGGGCACGT | 470 |
| hZC3H12A_gRNA_134 | AGCTGGCCTACGAGTCTGAC | 471 |
| hZC3H12A_gRNA_135 | GTGGGTGGGGGCAGTGGGTA | 472 |
| hZC3H12A_gRNA_136 | CATCTGCAGTTCCAGGGCCG | 473 |
| hZC3H12A_gRNA_137 | GATGACCCACTGGGCCGGCA | 474 |
| hZC3H12A_gRNA_138 | TGACCTCCAAGGCGAGCGGC | 475 |
| hZC3H12A_gRNA_139 | GGATCTCGGCAGCCAGCTGC | 476 |
| hZC3H12A_gRNA_140 | TCCTTTTCCTCTTCTGGGAG | 477 |
| hZC3H12A_gRNA_141 | CACGACGCGTGGGTGGCAAG | 478 |
| hZC3H12A_gRNA_142 | TTCACACCATCACGACGCGT | 479 |
| hZC3H12A_gRNA_143 | GCAGGAGCCTCGCACCTAGC | 480 |
| hZC3H12A_gRNA_144 | CACCCCTAAGGCTCCCAACC | 481 |
| hZC3H12A_gRNA_145 | TTGTCCTTGCTTGGGGCTCT | 482 |
| hZC3H12A_gRNA_146 | CAGGACAGGCTTCTCTCCAC | 483 |
| hZC3H12A_gRNA_147 | CACCTGGTGGAGGCTGTGAT | 484 |
| hZC3H12A_gRNA_148 | CGTCTGTGGGAGCCAGTCTG | 485 |
| hZC3H12A_gRNA_149 | CCCCCCAAAGTTCCGACATC | 486 |
| hZC3H12A_gRNA_150 | AGGCAGCCTGGCCAAGGAGC | 487 |
| hZC3H12A_gRNA_151 | TCTGCCTTTGGCCGGGCCAT | 488 |
| hZC3H12A_gRNA_152 | GGACAGGCTTCTCTCCACAG | 489 |
| hZC3H12A_gRNA_153 | ACGTGCCCATCACAGGTGAG | 490 |
| hZC3H12A_gRNA_154 | AGAGAGTGAGCAGTGCAGCC | 491 |
| hZC3H12A_gRNA_155 | CGCAGGAAGTTGTCCAGGCT | 492 |
| hZC3H12A_gRNA_156 | GGCTGGGAGCTCAGATCCAT | 493 |
| hZC3H12A_gRNA_157 | CAGCTCACCCAGCACCGTGT | 494 |
| hZC3H12A_gRNA_158 | CCAGCACATCCTGCGGGAAC | 495 |
| hZC3H12A_gRNA_159 | GACCTCCTTGTTCCCATGGC | 496 |
| hZC3H12A_gRNA_160 | GGGGTTCGAGGAGGAGGCCC | 497 |
| hZC3H12A_gRNA_161 | CAGAGAAGGCTGCGGTGGCT | 498 |
| hZC3H12A_gRNA_162 | GGGAGTGAGTCCAGCGTCTG | 499 |
| hZC3H12A_gRNA_163 | CAGGAGCCTCGCACCTAGCG | 500 |
| hZC3H12A_gRNA_164 | GGAGGAGGCCCTGGTGAGCC | 501 |
| hZC3H12A_gRNA_165 | CAAGCAAGGACAAAAATGGC | 502 |
| hZC3H12A_gRNA_166 | CGTCAGGGCACCCCAAGGCC | 503 |
| hZC3H12A_gRNA_167 | GCTGGCAGTGAACTGGTTTC | 504 |
| hZC3H12A_gRNA_168 | ACCTCCTTGTTCCCATGGCT | 505 |
| hZC3H12A_gRNA_169 | TCCCGCAGGATGTGCTGGTC | 506 |
| hZC3H12A_gRNA_170 | AGGGACTGTAGCCCGTGTAA | 507 |
| hZC3H12A_gRNA_171 | CCAGTACTCTCGAGGTGGAA | 508 |
| hZC3H12A_gRNA_172 | AATTCCCACAGACTCATGGT | 509 |
| hZC3H12A_gRNA_173 | CCCACCCCGAGCCCCTTACA | 510 |
| hZC3H12A_gRNA_174 | GTGCATTTCCTTCCTGGAAG | 511 |
| hZC3H12A_gRNA_175 | TCAGCGGCCAGCTCTTGACC | 512 |
| hZC3H12A_gRNA_176 | GGCCCGGCCAAAGGCAGAGA | 513 |
| hZC3H12A_gRNA_177 | ACAGAGCGCTGGGGGCAGCT | 514 |
| hZC3H12A_gRNA_178 | TCTTGATTCCTCTTCCAGGA | 515 |
| hZC3H12A_gRNA_179 | GCAAGGACAAAAATGGCCGG | 516 |
| hZC3H12A_gRNA_180 | CAGGGCAGGCAGCCTGGCCA | 517 |
| hZC3H12A_gRNA_181 | ATCTCGGCAGCCAGCTGCTG | 518 |
| hZC3H12A_gRNA_182 | CCCGCAGGATGTGCTGGTCT | 519 |
| hZC3H12A_gRNA_183 | GGCTCCAGGTTGGGAGCCTT | 520 |
| hZC3H12A_gRNA_184 | CAACACGGTGCTGGGTGAGC | 521 |
| hZC3H12A_gRNA_185 | GCAGCCGTGTCCCTATGGTA | 522 |
| hZC3H12A_gRNA_186 | TGTCCTTGCTTGGGGCTCTG | 523 |
| hZC3H12A_gRNA_187 | TCATGGTGGGGCTGGCTTCC | 524 |
| hZC3H12A_gRNA_188 | GAAGCTGGGCTATTCATCCA | 525 |
| hZC3H12A_gRNA_189 | GACCCTCTTGGCGGGACCCT | 526 |
| hZC3H12A_gRNA_190 | GGAAAGGCAGGGGGCGCGGG | 527 |
| hZC3H12A_gRNA_191 | AGGTCTGTGTTAGACCCTCT | 528 |
| hZC3H12A_gRNA_192 | CTCAGCTCCCTCTAGTCCCG | 529 |
| hZC3H12A_gRNA_193 | TAGGGACTGTAGCCCGTGTA | 530 |
| hZC3H12A_gRNA_194 | AGGGGGCATAAACCTGCAGA | 531 |
| hZC3H12A_gRNA_195 | CTCCCAGGATTGCCTGGACT | 532 |
| hZC3H12A_gRNA_196 | GGGATGAAGGTGAAGGCCGC | 533 |
| hZC3H12A_gRNA_197 | TGCAGAGCCCAGGGGCTGGC | 534 |
| hZC3H12A_gRNA_198 | GAATCGGCACTTGATCCCAT | 535 |
| hZC3H12A_gRNA_199 | CCGAGGCTGCTCCTTCCTCC | 536 |
| hZC3H12A_gRNA_200 | CCAGCTTCTGCAGGACGCTG | 537 |
| hZC3H12A_gRNA_201 | GGGCCGGCACGGGCCCAGCC | 538 |
| hZC3H12A_gRNA_202 | TGAGGTCTGGCGCTCCCGCT | 539 |
| hZC3H12A_gRNA_203 | TTGGGGTGCCCTGACGGCTG | 540 |
| hZC3H12A_gRNA_204 | ACTAGAGGGAGCTGAGGGCA | 541 |
| hZC3H12A_gRNA_205 | CCAGTTCCCGCAGGATGTGC | 542 |
| hZC3H12A_gRNA_206 | TATGCCCCCTGATGACCCAC | 543 |
| hZC3H12A_gRNA_207 | GTGAGAGGAGAGCATTGGCA | 544 |
| hZC3H12A_gRNA_208 | AGCTTACTCACTGGGGTGCT | 545 |
| hZC3H12A_gRNA_209 | ATCACAGCCTCCACCAGGTG | 546 |
| hZC3H12A_gRNA_210 | ACTGAAGTGGCCAGCACCCA | 547 |
| hZC3H12A_gRNA_211 | GCCGGCCCAGTGGGTCATCA | 548 |
| hZC3H12A_gRNA_212 | CCTGCAGAAGCTGGGCGTCC | 549 |
| hZC3H12A_gRNA_213 | GCACCGTGTTGGTGTCTGCC | 550 |
| hZC3H12A_gRNA_214 | GGCCCTGGAACTGCAGATGA | 551 |
| hZC3H12A_gRNA_215 | GTCCTTGCTTGGGGCTCTGG | 552 |
| hZC3H12A_gRNA_216 | CTCCCTGGAGAGCCAGATGT | 553 |
| hZC3H12A_gRNA_217 | AAATTCCCACAGACTCATGG | 554 |
| hZC3H12A_gRNA_218 | TCATCTGCCACAGAGCGCTG | 555 |
| hZC3H12A_gRNA_219 | AGTCGGCAGGGACACTGAAG | 556 |
| hZC3H12A_gRNA_220 | ACTCTCGAGGTGGAAAGGCA | 557 |
| hZC3H12A_gRNA_221 | CCCAGTGAGTAAGCTGCCTG | 558 |
| hZC3H12A_gRNA_222 | AGAGGGTGCAAAGAACTCTC | 559 |
| hZC3H12A_gRNA_223 | CACGATCCCGTCAGACTCGT | 560 |
| hZC3H12A_gRNA_224 | TCTGCACTGGGGGCTCCTGA | 561 |
| hZC3H12A_gRNA_225 | CAGGGGGCATAAACCTGCAG | 562 |
| hZC3H12A_gRNA_226 | TGAGGACAGCCACAGCCGTC | 563 |
| hZC3H12A_gRNA_227 | GTTTCCCCCGCACCTGGTGG | 564 |
| hZC3H12A_gRNA_228 | TTAGGGGTGCCACCACCCCG | 565 |
| hZC3H12A_gRNA_229 | ACTGGGGTGCTGGGACTTGT | 566 |
| hZC3H12A_gRNA_230 | CTCACTCCCGTACGTCTCCC | 567 |
| hZC3H12A_gRNA_231 | AGGGGCTGGCAGGAGCCCGT | 568 |
| hZC3H12A_gRNA_232 | TCCTTGTTCCCATGGCTGGG | 569 |
| hZC3H12A_gRNA_233 | GCCAAAGGCAGAGAAGGCTG | 570 |
| hZC3H12A_gRNA_234 | CACGGGCTCCTGCCAGCCCC | 571 |
| hZC3H12A_gRNA_235 | CCACAGCGTCCTGCAGAAGC | 572 |
| hZC3H12A_gRNA_236 | ACGGGCTCCTGCCAGCCCCT | 573 |
| hZC3H12A_gRNA_237 | ATGGGAGCAACGTGGCCATG | 574 |
| hZC3H12A_gRNA_238 | CCCAAGGCCGGGTCAAGAGC | 575 |
| hZC3H12A_gRNA_239 | AATTGCTGAGAAGGGGCCGA | 576 |
| hZC3H12A_gRNA_240 | GGGCAGGAGTGAGGAGGGCC | 577 |
| hZC3H12A_gRNA_241 | GGCGGGACCCTGGGGATGCC | 578 |
| hZC3H12A_gRNA_242 | GGGGCTGGCAGGAGCCCGTG | 579 |
| hZC3H12A_gRNA_243 | TTCCGACATCTGGCTCTCCA | 580 |
| hZC3H12A_gRNA_244 | GTGCTGCCCTTGCCAGCCAC | 581 |
| hZC3H12A_gRNA_245 | ACTCCTGCCGCTCGCCTTGG | 582 |
| hZC3H12A_gRNA_246 | GTGGACTTCTTCCGGAAGCT | 583 |
| hZC3H12A_gRNA_247 | CCAGTGCAGAGCCCAGGGGC | 584 |
| hZC3H12A_gRNA_248 | GGGGCAGTGGCAGCAGCTTT | 585 |
| hZC3H12A_gRNA_249 | GGGACTGTAGCCCGTGTAAG | 586 |
| hZC3H12A_gRNA_250 | CCACAGACTCATGGTGGGGC | 587 |
| hZC3H12A_gRNA_251 | AACACGGGACAGCCACCGAG | 588 |
| hZC3H12A_gRNA_252 | GCAAAGAACTCTCTGGAGGT | 589 |
| hZC3H12A_gRNA_253 | TGGGCCCGTGCCGGCCCAGT | 590 |
| hZC3H12A_gRNA_254 | CTCCTGCCGGGGCATCCTGC | 591 |
| hZC3H12A_gRNA_255 | AGGCAGACAGGTGAGAGGAA | 592 |
| hZC3H12A_gRNA_256 | AGGCAATCCTGGGAGACGTA | 593 |
| hZC3H12A_gRNA_257 | TCAGACCAGTACTCTCGAGG | 594 |
| hZC3H12A_gRNA_258 | AACATACTTGTCATTGACGA | 595 |
| hZC3H12A_gRNA_259 | GGCAGCTTGGCCGCTCTGGG | 596 |
| hZC3H12A_gRNA_260 | GAGTTCTTTGCACCCTCTGC | 597 |
| hZC3H12A_gRNA_261 | GCCACAGGCAGCTTACTCAC | 598 |
| hZC3H12A_gRNA_262 | AGGCTGCCTGCCCTGCCCCA | 599 |
| hZC3H12A_gRNA_263 | CCGGCCCAGTGGGTCATCAG | 600 |
| hZC3H12A_gRNA_264 | CTCTCGAGGTGGAAAGGCAG | 601 |
| hZC3H12A_gRNA_265 | GATTGCCTGGACTCGGGCAT | 602 |
| hZC3H12A_gRNA_266 | TCCTTGCTTGGGGCTCTGGG | 603 |
| hZC3H12A_gRNA_267 | GCAGAGAAGGCTGCGGTGGC | 604 |
| hZC3H12A_gRNA_268 | ACCGTGACCTCCAAGGCGAG | 605 |
| hZC3H12A_gRNA_269 | CAGGACGCTGTGGATCTCCG | 606 |
| hZC3H12A_gRNA_270 | AGGAAGCAGCCGTGTCCCTA | 607 |
| hZC3H12A_gRNA_271 | ACGCAGGAAGTTGTCCAGGC | 608 |
| hZC3H12A_gRNA_272 | GAGGTCCCCAAGAGGAAAAC | 609 |
| hZC3H12A_gRNA_273 | CCCCCAGCTTCTTCCCATCC | 610 |
| hZC3H12A_gRNA_274 | ATTCCCACAGACTCATGGTG | 611 |
| hZC3H12A_gRNA_275 | TCCAAGGCGAGCGGCAGGAG | 612 |
| hZC3H12A_gRNA_276 | GCTGGGAGCTCAGATCCATA | 613 |
| hZC3H12A_gRNA_277 | TGGGGGCCCAGGCATCCCCA | 614 |
| hZC3H12A_gRNA_278 | GGGTGCAAAGAACTCTCTGG | 615 |
| hZC3H12A_gRNA_279 | GCGGGACTAGAGGGAGCTGA | 616 |
| hZC3H12A_gRNA_280 | ACTGGAGAAGAAGAAGATCC | 617 |
| hZC3H12A_gRNA_281 | CCAGCTCTTGACCCGGCCTT | 618 |
| hZC3H12A_gRNA_282 | GAACTTTGGGGGGTTCGAGG | 619 |
| hZC3H12A_gRNA_283 | GAAACCAGTTCACTGCCAGC | 620 |
| hZC3H12A_gRNA_284 | ACAGCCGTCAGGGCACCCCA | 621 |
| hZC3H12A_gRNA_285 | CCACCCCGAGCCCCTTACAC | 622 |
| hZC3H12A_gRNA_286 | TCTCGGCAGCCAGCTGCTGG | 623 |
| hZC3H12A_gRNA_287 | AGAGAGCTGGACTGGGATGA | 624 |
| hZC3H12A_gRNA_288 | CCTTTCCACCTCGAGAGTAC | 625 |
| hZC3H12A_gRNA_289 | AAGCTGGCCTACGAGTCTGA | 626 |
| hZC3H12A_gRNA_290 | GTCTGTGGGAGCCAGTCTGT | 627 |
| hZC3H12A_gRNA_291 | AGACCTATGCCCCATCAGGC | 628 |
| hZC3H12A_gRNA_292 | TGGGAAGAAGCTGGGGGCCC | 629 |
| hZC3H12A_gRNA_293 | CTGTGGAGAGAAGCCTGTCC | 630 |
| hZC3H12A_gRNA_294 | GGGACTTCTAATTGCTGAGA | 631 |
| hZC3H12A_gRNA_295 | GGACTCGGGCATTGGCTCCC | 632 |
| hZC3H12A_gRNA_296 | CATCTGCCACAGAGCGCTGG | 633 |
| hZC3H12A_gRNA_297 | CTTCTGGGAGTGGAGGCTCC | 634 |
| hZC3H12A_gRNA_298 | GCCCCCAGTGCAGAGCCCAG | 635 |
| hZC3H12A_gRNA_299 | TTTGTCCTTGCTTGGGGCTC | 636 |
| hZC3H12A_gRNA_300 | GTGGGGCTGGCTTCCAGGAC | 637 |
| hZC3H12A_gRNA_301 | TCAAGAGCTGGCCGCTGAGG | 638 |
| hZC3H12A_gRNA_302 | CCTCTAGTCCCGCGGGGTGG | 639 |
| hZC3H12A_gRNA_303 | GCTCATCTGCCACAGAGCGC | 640 |
| hZC3H12A_gRNA_304 | CATGAGTCTGTGGGAATTTG | 641 |
| hZC3H12A_gRNA_305 | TGCGAGGCTCCTGCCTGATG | 642 |
| hZC3H12A_gRNA_306 | GGAGTGAGTCCAGCGTCTGT | 643 |
| hZC3H12A_gRNA_307 | TGCAAAGAACTCTCTGGAGG | 644 |
| hZC3H12A_gRNA_308 | CACAGCGTCCTGCAGAAGCT | 645 |
| hZC3H12A_gRNA_309 | CAGCTTACTCACTGGGGTGC | 646 |
| hZC3H12A_gRNA_310 | ACTGATGTGGGTGGGGGCAG | 647 |
| hZC3H12A_gRNA_311 | GCAGGATGTGCTGGTCTGGG | 648 |
| hZC3H12A_gRNA_312 | TCACAGTGTTTGTGCCATCC | 649 |
| hZC3H12A_gRNA_313 | GTTTGTGCCATCCTGGAGGA | 650 |
| hZC3H12A_gRNA_314 | TCCTGAAGGACTGATGTGGG | 651 |
| hZC3H12A_gRNA_315 | TGTTAGCAGAGAGCTGGACT | 652 |
| hZC3H12A_gRNA_316 | CAGTGTTTGTGCCATCCTGG | 653 |
| hZC3H12A_gRNA_317 | AGTCTGTCAGGGCCTCTGGG | 654 |
| hZC3H12A_gRNA_318 | TCTCGAGGTGGAAAGGCAGG | 655 |
| hZC3H12A_gRNA_319 | AGACTGGCTCCCACAGACGC | 656 |
| hZC3H12A_gRNA_320 | AGCCACTCACTTTGGAGCAC | 657 |
| hZC3H12A_gRNA_321 | TCCCAGGATTGCCTGGACTC | 658 |
| hZC3H12A_gRNA_322 | CCTGGAACTGCAGATGAAGG | 659 |
| hZC3H12A_gRNA_323 | GGGGCGCTTCCCACAGCTCC | 660 |
| hZC3H12A_gRNA_324 | CAGCCCCTGGGCTCTGCACT | 661 |
| hZC3H12A_gRNA_325 | GCGCGGGTGGGTAGTCGGCA | 662 |
| hZC3H12A_gRNA_326 | GCCCCAAGCAAGGACAAAAA | 663 |
| hZC3H12A_gRNA_327 | AGCCTGGATGGGAAGAAGCT | 664 |
| hZC3H12A_gRNA_328 | CAGCTCTTGACCCGGCCTTG | 665 |
| hZC3H12A_gRNA_329 | TAGGGGTGCCACCACCCCGC | 666 |
| hZC3H12A_gRNA_330 | TCCACTCCCAGAAGAGGAAA | 667 |
| hZC3H12A_gRNA_331 | GGAAGCGCTTCATCGAGGAG | 668 |
| hZC3H12A_gRNA_332 | GCATCCTGCTGGCAGTGAAC | 669 |
| hZC3H12A_gRNA_333 | TGGATGAATAGCCCAGCTTC | 670 |
| hZC3H12A_gRNA_334 | ACACGGGACAGCCACCGAGC | 671 |
| hZC3H12A_gRNA_335 | GGGCTCCTGAAGGACTGATG | 672 |
| hZC3H12A_gRNA_336 | CAGCCTGGATGGGAAGAAGC | 673 |
| hZC3H12A_gRNA_337 | TTTTCCTCTTCTGGGAGTGG | 674 |
| hZC3H12A_gRNA_338 | CTCCAGGTTGGGAGCCTTAG | 675 |
| hZC3H12A_gRNA_339 | GGGAGCTGAGGGCAGGGGTC | 676 |
| hZC3H12A_gRNA_340 | AGATGAAGGTGGACTTCTTC | 677 |
| hZC3H12A_gRNA_341 | TTTGGCCGGGCCATGGGTGC | 678 |
| hZC3H12A_gRNA_342 | CTCGCACCTAGCGGGGGCAG | 679 |
| hZC3H12A_gRNA_343 | CCCGTGTAAGGGGCTCGGGG | 680 |
| hZC3H12A_gRNA_344 | TGCCGGCCCAGTGGGTCATC | 681 |
| hZC3H12A_gRNA_345 | AAAGGCAGAGAAGGCTGCGG | 682 |
| hZC3H12A_gRNA_346 | AGGAGCCCGTGGGGCAGGGC | 683 |
| hZC3H12A_gRNA_347 | TAAGGGGCTCGGGGTGGGCC | 684 |
| hZC3H12A_gRNA_348 | ACACCATCACGACGCGTGGG | 685 |
| hZC3H12A_gRNA_349 | CTGGCAGGAGCCCGTGGGGC | 686 |
| hZC3H12A_gRNA_350 | CCGGCCTTGGGGTGCCCTGA | 687 |
| hZC3H12A_gRNA_351 | CTGTGTTAGACCCTCTTGGC | 688 |
| hZC3H12A_gRNA_352 | GTGATGGGCACGTCGGGCCG | 689 |
| hZC3H12A_gRNA_353 | GCCCCTGGGCTCTGCACTGG | 690 |
| hZC3H12A_gRNA_354 | CTGGGTGAGCTGGTGAAACA | 691 |
| hZC3H12A_gRNA_355 | GGCTGCTCCTTCCTCCAGGA | 692 |
| hZC3H12A_gRNA_356 | ACAGCCTCCACCAGGTGCGG | 693 |
| hZC3H12A_gRNA_357 | TGCCCGAGTCCAGGCAATCC | 694 |
| hZC3H12A_gRNA_358 | AGGTGGAAAGGCAGGGGGCG | 695 |
| hZC3H12A_gRNA_359 | CGACAGATTCATTGTGAAGC | 696 |
| hZC3H12A_gRNA_360 | GCGGGGTGGTGGCACCCCTA | 697 |
| hZC3H12A_gRNA_361 | GGCAATCCTGGGAGACGTAC | 698 |
| hZC3H12A_gRNA_362 | GCCGCTCGCCTTGGAGGTCA | 699 |
| hZC3H12A_gRNA_363 | TCACTGCCAGCAGGATGCCC | 700 |
| hZC3H12A_gRNA_364 | CCTGAAGGACTGATGTGGGT | 701 |
| hZC3H12A_gRNA_365 | GTGCGAGGCTCCTGCCTGAT | 702 |
| hZC3H12A_gRNA_366 | GCACCTGGTGGAGGCTGTGA | 703 |
| hZC3H12A_gRNA_367 | TCACAGCCTCCACCAGGTGC | 704 |
| hZC3H12A_gRNA_368 | GCCGCTCTGGGTGGAAGAAT | 705 |
| hZC3H12A_gRNA_369 | GACTAGAGGGAGCTGAGGGC | 706 |
| hZC3H12A_gRNA_370 | TCAGCTCCCTCTAGTCCCGC | 707 |
| hZC3H12A_gRNA_371 | GGAGCCTCCACTCCCAGAAG | 708 |
| hZC3H12A_gRNA_372 | AGACCCTCTTGGCGGGACCC | 709 |
| hZC3H12A_gRNA_373 | CCACCTTCATCTGCAGTTCC | 710 |
| hZC3H12A_gRNA_374 | GGGAGTGGAGGCTCCAGGTT | 711 |
| hZC3H12A_gRNA_375 | CAGTGAACTGGTTTCTGGAG | 712 |
| hZC3H12A_gRNA_376 | TCACCTGTGATGGGCACGTC | 713 |
| hZC3H12A_gRNA_377 | TGCCAGCAGGATGCCCCGGC | 714 |
| hZC3H12A_gRNA_378 | ACCCTCTTGGCGGGACCCTG | 715 |
| hZC3H12A_gRNA_379 | TGGGGGCAGCTTGGCCGCTC | 716 |
| hZC3H12A_gRNA_380 | AGGAGGAGGCCCTGGTGAGC | 717 |
| hZC3H12A_gRNA_381 | CTGGAGGTGGGAGCCATGCA | 718 |
| hZC3H12A_gRNA_382 | TCTGGAGGTGGGAGCCATGC | 719 |
| hZC3H12A_gRNA_383 | CCTGGATGGGAAGAAGCTGG | 720 |
| hZC3H12A_gRNA_384 | CCAGCCCCTGGGCTCTGCAC | 721 |
| hZC3H12A_gRNA_385 | GGAGTGGAAGCGCTTCATCG | 722 |
| hZC3H12A_gRNA_386 | TGTAGCCCGTGTAAGGGGCT | 723 |
| hZC3H12A_gRNA_387 | GGAGTGAGGAGGGCCGGGGA | 724 |
| hZC3H12A_gRNA_388 | GAGGTCACGGTATGTGTCGT | 725 |
| hZC3H12A_gRNA_389 | CTAGAGGGAGCTGAGGGCAG | 726 |
| hZC3H12A_gRNA_390 | TGGTGTGTTTCCCCCGCACC | 727 |
| hZC3H12A_gRNA_391 | CTGATGTGGGTGGGGGCAGT | 728 |
| hZC3H12A_gRNA_392 | AGGGCCGGGGAGGGCAGGCT | 729 |
| hZC3H12A_gRNA_393 | TGAGCTATGAGTGGCCCCTG | 730 |
| hZC3H12A_gRNA_394 | TCTTACGCAGGAAGTTGTCC | 731 |
| hZC3H12A_gRNA_395 | GTTCCGACATCTGGCTCTCC | 732 |
| hZC3H12A_gRNA_396 | AGGGGGCGCGGGTGGGTAGT | 733 |
| hZC3H12A_gRNA_397 | CGCTGGCCTGCTCCTTGGCC | 734 |
| hZC3H12A_gRNA_398 | GAAAGGCAGGGGGCGCGGGT | 735 |
| hZC3H12A_gRNA_399 | TAGCCCGTGTAAGGGGCTCG | 736 |
| hZC3H12A_gRNA_400 | CTGAGGGCAGGGGTCCGGTG | 737 |
| hZC3H12A_gRNA_401 | ACACAGCTTAGTATACACGC | 738 |
| hZC3H12A_gRNA_402 | CCGTCAGGGCACCCCAAGGC | 739 |
| hZC3H12A_gRNA_403 | GGCAGGGGTCCGGTGAGGTC | 740 |
| hZC3H12A_gRNA_404 | GGACTTGTAGGAGAGGATCT | 741 |
| hZC3H12A_gRNA_405 | TCCCAGCCATGGGAACAAGG | 742 |
| hZC3H12A_gRNA_406 | GACTTCTAATTGCTGAGAAG | 743 |
| hZC3H12A_gRNA_407 | GGCTCCTGAAGGACTGATGT | 744 |
| hZC3H12A_gRNA_408 | TGGCAGGAGCCCGTGGGGCA | 745 |
| hZC3H12A_gRNA_409 | AGACAGGTGAGAGGAAGGGC | 746 |
| hZC3H12A_gRNA_410 | TCGGAACTTTGGGGGGTTCG | 747 |
| hZC3H12A_gRNA_411 | GCCTGGATGGGAAGAAGCTG | 748 |
| hZC3H12A_gRNA_412 | TGAAGGACTGATGTGGGTGG | 749 |
| hZC3H12A_gRNA_413 | CTGGGGGCCCAGGCATCCCC | 750 |
| hZC3H12A_gRNA_414 | GAGCCCCCAGTGCAGAGCCC | 751 |
| hZC3H12A_gRNA_415 | GGCGCGGGTGGGTAGTCGGC | 752 |
| hZC3H12A_gRNA_416 | CCGTGTAAGGGGCTCGGGGT | 753 |
| hZC3H12A_gRNA_417 | GTCGTGATGGTGTGAACACC | 754 |
| hZC3H12A_gRNA_418 | ACGACGCGTGGGTGGCAAGC | 755 |
| hZC3H12A_gRNA_419 | GGGGGCAGTGGCAGCAGCTT | 756 |
| hZC3H12A_gRNA_420 | AGCGTGTATACTAAGCTGTG | 757 |
| hZC3H12A_gRNA_421 | GCTCCTGCCTGATGGGGCAT | 758 |
| hZC3H12A_gRNA_422 | GTCTGTCAGGGCCTCTGGGA | 759 |
| hZC3H12A_gRNA_423 | GTAGCCCGTGTAAGGGGCTC | 760 |
| hZC3H12A_gRNA_424 | AGCCCCTGGGCTCTGCACTG | 761 |
| hZC3H12A_gRNA_425 | GTGAACTGGTTTCTGGAGCG | 762 |
| hZC3H12A_gRNA_426 | CTACGAGTCTGACGGGATCG | 763 |
| hZC3H12A_gRNA_427 | AGTGAACTGGTTTCTGGAGC | 764 |
| hZC3H12A_gRNA_428 | ACGCGTGGGTGGCAAGCGGG | 765 |
| hZC3H12A_gRNA_429 | CGCGGGACTAGAGGGAGCTG | 766 |
| hZC3H12A_gRNA_430 | GGCAGGAGTGAGGAGGGCCG | 767 |
| hZC3H12A_gRNA_431 | AAGTGAGTGGCTTCTTACGC | 768 |
| hZC3H12A_gRNA_432 | CTGAAGGACTGATGTGGGTG | 769 |
| hZC3H12A_gRNA_433 | TTGCCACCCACGCGTCGTGA | 770 |
| hZC3H12A_gRNA_434 | AGGGCAGGAGTGAGGAGGGC | 771 |
| hZC3H12A_gRNA_435 | TCTTCTTCTCCAGTTCCCGC | 772 |
| hZC3H12A_gRNA_436 | AGGAGTGAGGAGGGCCGGGG | 773 |
| hZC3H12A_gRNA_437 | ACTCCCAGAAGAGGAAAAGG | 774 |
| hZC3H12A_gRNA_438 | TGAGGAGGGCCGGGGAGGGC | 775 |
| hZC3H12A_gRNA_439 | ACCTGGTGGAGGCTGTGATG | 776 |
| hZC3H12A_gRNA_440 | CAGGGCCGAGGCCTCCTCAG | 777 |
| hZC3H12A_gRNA_441 | TACTCTCGAGGTGGAAAGGC | 778 |
| hZC3H12A_gRNA_442 | TTGGGGCTCTGGGGGGTGAG | 779 |
| hZC3H12A_gRNA_443 | GCTCCTGGACCCCCAGCAGC | 780 |
| hZC3H12A_gRNA_444 | GGGGGGTGAGAGGAGAGCAT | 781 |
| hZC3H12A_gRNA_445 | CGGCCCAGTGGGTCATCAGG | 782 |
| hZC3H12A_gRNA_446 | AGGAAGGGCAGGAGTGAGGA | 783 |
| hZC3H12A_gRNA_447 | GAGGGCCGGGGAGGGCAGGC | 784 |
| hZC3H12A_gRNA_448 | TGCTGGGGGTCCAGGAGCTG | 785 |
| hZC3H12A_gRNA_449 | GCTGGGGGTCCAGGAGCTGT | 786 |
| hZC3H12A_gRNA_450 | TGAGAGGAAGGGCAGGAGTG | 787 |
| hZC3H12A_gRNA_451 | TGGGAGTGGAGGCTCCAGGT | 788 |
| hZC3H12A_gRNA_452 | GAGGAAGGGCAGGAGTGAGG | 789 |

TABLE 31
Exemplary murine Zc3h12a gRNA sequences

| Target | Sequence | SEQ ID |
|---|---|---|
| mZc3h12a_gRNA_1 | GCTGGCTGTGAACTGGTTTC | 790 |
| mZc3h12a_gRNA_2 | CTAGTTCCCGAAGGATGTGC | 791 |
| mZc3h12a_gRNA_3 | ATTGGAGACCACCACTCCGT | 792 |
| mZc3h12a_gRNA_4 | TTCCCTCCTCTGCCAGCCAT | 793 |
| mZc3h12a_gRNA_5 | CGAAGGAAGTTGTCCAGGCT | 794 |
| mZc3h12a_gRNA_6 | ATACCTGTGATAGGCACATC | 795 |
| mZc3h12a_gRNA_7 | GACTTCCTTGTTCCCATGGC | 796 |
| mZc3h12a_gRNA_8 | GGCCTTCGAATCCGACGGAG | 797 |

[0658] In some embodiments, the gene-regulating system comprises at least one gRNA molecule that comprises a CBLB-targeting nucleic acid-binding segment (i.e., a CBLB-targeting gRNA). In some embodiments, the nucleic acid-binding segment of the at least one CBLB-targeting gRNA molecules binds to a target DNA sequence that is at least 95%, 96%, 97%, 98%, or 99% identical to a DNA sequence encoded by the CBLB gene (SEQ ID NO: 7) or the Cblb gene (SEQ ID NO: 8). In some embodiments, the nucleic acid-binding segment of the at least one CBLB-targeting gRNA molecules binds to a target DNA sequence that is 100% identical to a DNA sequence encoded by the CBLB gene (SEQ ID NO: 7) or the Cblb gene (SEQ ID NO: 8).

[0659] In some embodiments, the nucleic acid-binding segment of the at least one CBLB-targeting gRNA molecule binds to a target DNA sequence that is at least 95%, 96%, 97%, 98%, or 99% identical to a DNA sequence defined by a set of genomic coordinates shown in Table 17 or Table 18. In some embodiments, the nucleic acid-binding segment of the at least one CBLB-targeting gRNA molecules binds to a target DNA sequence that is 100% identical to a DNA sequence defined by a set of genomic coordinates shown in Table 17 or Table 18. In some embodiments, the nucleic acid-binding segment of the at least one CBLB-targeting gRNA molecules binds to a target DNA sequence that is at least 95%, 96%, 97%, 98%, or 99% identical to one of SEQ ID NOs: 798-823 or 798-808. In some embodiments, the nucleic acid-binding segment of the at least one CBLB-targeting gRNA molecules binds to a target DNA sequence that is 100% identical to one of SEQ ID NOs: 798-823 or 798-808. Exemplary CBLB/Cblb target DNA sequences are shown in Tables 32 and 33.

[0660] In some embodiments, the nucleic acid-binding segment of the at least one CBLB-targeting gRNA molecule is encoded by a DNA sequence that is at least 95%, 96%, 97%, 98%, or 99% identical to one of SEQ ID NOs: 798-823 or 798-808. In some embodiments, the nucleic acid-binding segment of the at least one CBLB-targeting gRNA molecules is encoded by a DNA sequence that is 100% identical to one of SEQ ID NOs: 798-823 or 798-808. Exemplary DNA sequences encoding the nucleic acid-binding segment of the CBLB/Cblb-targeting gRNAs are shown in Tables 32 and 33.

TABLE 32
Exemplary human CBLB gRNA sequences

| Target | Sequence | SEQ ID |
|---|---|---|
| hCBLB_gRNA_1 | CCTTATGAAAAAGTCAAAAC | 798 |
| hCBLB_gRNA_2 | AAAATATCAAGTATATATGG | 799 |
| hCBLB_gRNA_3 | TCTAGCATCGGCATGCCAAA | 800 |
| hCBLB_gRNA_4 | TTGGAAGCTCATGGACAAAG | 801 |
| hCBLB_gRNA_5 | GATTTCCTCCTCGACCACCA | 802 |
| hCBLB_gRNA_6 | CTTCATCTCTTGGATCAAAG | 803 |
| hCBLB_gRNA_7 | AATGTATGAAGAACAGTCAC | 804 |
| hCBLB_gRNA_8 | TAAACTTACCTGAAACAGCC | 805 |
| hCBLB_gRNA_9 | AAGAATATGATGTTCCTCCC | 806 |
| hCBLB_gRNA_10 | AGCAAGCTGCCGCAGATCGC | 807 |
| hCBLB_gRNA_11 | AGTACTCATTCTCACTGAGT | 808 |

TABLE 33
Exemplary murine Cblb gRNA sequences

| Target | Sequence | SEQ ID |
|---|---|---|
| mCblb_gRNA_1 | TCTTTGTTGCAGGAGTCTGA | 809 |
| mCblb_gRNA_2 | CAGGGGCTTGTTATGAGGTA | 810 |
| mCblb_gRNA_3 | CTGATTGATGGTAGCAGGGA | 811 |
| mCblb_gRNA_4 | CCTTATCTTCAGTCACATGC | 812 |
| mCblb_gRNA_5 | TCACATGCTGGCAGAAATCA | 813 |
| mCblb_gRNA_6 | TTCTGTCGCTGTGAGATAAA | 814 |
| mCblb_gRNA_7 | ACAAGGCAGTACCTGCCACG | 815 |
| mCblb_gRNA_8 | TGTGACTCACCCGGGATACA | 816 |
| mCblb_gRNA_9 | GAGGTCCATCAGATCAGCTC | 817 |
| mCblb_gRNA_10 | ATCTCCCTGGAACTGGCCAT | 818 |
| mCblb_gRNA_11 | TGCAAAAATTGCAAAACTCA | 819 |
| mCblb_gRNA_12 | TGCACAGAACTATTGTACCA | 820 |
| mCblb_gRNA_13 | CAGATTAGTGCTTACCTTCC | 821 |
| mCblb_gRNA_14 | ATTCCGTAAAATAGAGCCCC | 822 |
| mCblb_gRNA_15 | CTGCACTCGGCTGGGACAAT | 823 |

[0661] In some embodiments, the gene-regulating system comprises at least one gRNA molecule that comprises a RC3H1-targeting nucleic acid-binding segment (i.e., a RC3H1-targeting gRNA). In some embodiments, the nucleic acid-binding segment of the at least one RC3H1-targeting gRNA molecules binds to a target DNA sequence that is at least 95%, 96%, 97%, 98%, or 99% identical to a DNA sequence encoded by the RC3H1 gene (SEQ ID NO: 9) or the Rc3h1 gene (SEQ ID NO: 10). In some embodiments, the nucleic acid-binding segment of the at least one RC3H1-targeting gRNA molecules binds to a target DNA sequence that is 100% identical to a DNA sequence encoded by the RC3H1 gene (SEQ ID NO: 9) or the Rc3h1 gene (SEQ ID NO: 10).

[0662] In some embodiments, the nucleic acid-binding segment of the at least one RC3H1-targeting gRNA molecule binds to a target DNA sequence that is at least 95%, 96%, 97%, 98%, or 99% identical to a DNA sequence defined by a set of genomic coordinates shown in Table 19 or Table 20. In some embodiments, the nucleic acid-binding segment of the at least one RC3H1-targeting gRNA molecules binds to a target DNA sequence that is 100% identical to a DNA sequence defined by a set of genomic coordinates shown in Table 19 or Table 20. In some embodiments, the nucleic acid-binding segment of the at least one RC3H1-targeting gRNA molecules binds to a target DNA sequence that is at least 95%, 96%, 97%, 98%, or 99% identical to one of SEQ ID NOs: 824-844 or 824-836. In some embodiments, the nucleic acid-binding segment of the at least one RC3H1-targeting gRNA molecules binds to a target DNA sequence that is 100% identical to one of SEQ ID NOs: 824-844 or 824-836. Exemplary RC3H1/Rc3h1 target DNA sequences are shown in Tables 34 and 35.

[0663] In some embodiments, the nucleic acid-binding segment of the at least one RC3H-targeting gRNA molecule is encoded by a DNA sequence that is at least 95%, 96%, 97%, 98%, or 99% identical to one of SEQ ID NOs: 824-844 or 824-836. In some embodiments, the nucleic acid-binding segment of the at least one RC-targeting gRNA molecules is encoded by a DNA sequence that is 100% identical to one of SEQ ID NOs: 824-844 or 824-836. Exemplary DNA sequences encoding the nucleic acid-binding segment of the RC3H1/Rc3h-targeting gRNAs are shown in Tables 34 and 35.

TABLE 34
Exemplary human RC3H1 gRNA sequences

| Target | Sequence | SEQ ID |
|---|---|---|
| hRC3H1_gRNA_1 | AGTCCATATGGAACCCACGG | 824 |
| hRC3H1_gRNA_2 | AGTCTGAGTGCAAATTGGGC | 825 |
| hRC3H1_gRNA_3 | TACGAATTGCACCGGACCAG | 826 |
| hRC3H1_gRNA_4 | TTAGAGGCTTGAGGAAACCG | 827 |
| hRC3H1_gRNA_5 | TTAGAACCTATGAAGCTCTG | 828 |
| hRC3H1_gRNA_6 | CCTGAATAAACTCCACCGCA | 829 |
| hRC3H1_gRNA_7 | AATTCGAAAGCCCATCAGTT | 830 |
| hRC3H1_gRNA_8 | TGGCCACAACCCAAACTGAT | 831 |
| hRC3H1_gRNA_9 | CAGCATACTCTGAGGTACGA | 832 |
| hRC3H1_gRNA_10 | TTACCTCTAGCACTGCTGAG | 833 |
| hRC3H1_gRNA_11 | TATGCAGTCCATTATTGACA | 834 |
| hRC3H1_gRNA_12 | GTAACACAGCTTATTCCGCG | 835 |
| hRC3H1_gRNA_13 | ACTTTCCCTAGCAATGCAGG | 836 |

TABLE 35
Exemplary murine Rc3h1 gRNA sequences

| Target | Sequence | SEQ ID |
|---|---|---|
| mRc3h1_gRNA_1 | CAAATGGGCAAGCCTTACGG | 837 |
| mRc3h1_gRNA_2 | CTCAATGTCCGTATTGATAG | 838 |
| mRc3h1_gRNA_3 | AGTCTGAGTGCAAATTGGGC | 839 |
| mRc3h1_gRNA_4 | CCAGATAGTGCAAATTGCTA | 840 |
| mRc3h1_gRNA_5 | TGATAGTGGTCTGGTCAAAT | 841 |
| mRc3h1_gRNA_6 | AATTCGAAAGCCCATCAGTT | 842 |
| mRc3h1_gRNA_7 | GCCCATTACTTTGTGTAGTG | 843 |
| mRc3h1_gRNA_8 | TGGCCACAGCCCAAACTGAT | 844 |

[0664] In some embodiments, the gene-regulating system comprises at least one gRNA molecule that comprises a NFKBIA-targeting nucleic acid-binding segment (i.e., a NFKBIA-targeting gRNA). In some embodiments, the nucleic acid-binding segment of the at least one NFKBIA-targeting gRNA molecule binds to a target DNA sequence that is at least 95%, 96%, 97%, 98%, or 99% identical to a DNA sequence encoded by the NFKBIA gene (SEQ ID NO: 11) or the Nfkbia gene (SEQ ID NO: 12). In some embodiments, the nucleic acid-binding segment of the at least one NFKBIA-targeting gRNA molecules binds to a target DNA sequence that is 100% identical to a DNA sequence encoded by the NFKBIA gene (SEQ ID NO: 11) or the Nfkbia gene (SEQ ID NO: 12).

[0665] In some embodiments, the nucleic acid-binding segment of the at least one NFKBIA-targeting gRNA molecule binds to a target DNA sequence that is at least 95%, 96%, 97%, 98%, or 99% identical to a DNA sequence defined by a set of genomic coordinates shown in Table 21 or Table 22. In some embodiments, the nucleic acid-binding segment of the at least one NFKBIA-targeting gRNA molecules binds to a target DNA sequence that is 100% identical to a DNA sequence defined by a set of genomic coordinates shown in Table 21 or Table 22. In some embodiments, the nucleic acid-binding segment of the at least one NFKBIA-targeting gRNA molecules binds to a target DNA sequence that is at least 95%, 96%, 97%, 98%, or 99% identical to one of SEQ ID NOs: 845-875 or 845-856. In some embodiments, the nucleic acid-binding segment of the at least one NFKBIA-targeting gRNA molecules binds to a target DNA sequence that is 100% identical to one of SEQ ID NOs: 845-875 or 845-856. Exemplary NFKBIA/Nfkbia target DNA sequences are shown in Tables 36 and 37.

[0666] In some embodiments, the nucleic acid-binding segment of the at least one NFKBIA-targeting gRNA molecule is encoded by a DNA sequence that is at least 95%, 96%, 97%, 98%, or 99% identical to one of SEQ ID NOs: 845-875 or 845-856. In some embodiments, the nucleic acid-binding segment of the at least one NFKBIA-targeting gRNA molecules is encoded by a DNA sequence that is 100% identical to one of SEQ ID NOs: 845-875 or 845-856. Exemplary DNA sequences encoding the nucleic acid-binding segment of the NFKBIA/Nfkbia-targeting gRNAs are shown in Tables 36 and 37.

TABLE 36
Exemplary human NFKBIA gRNA sequences

| Target | Sequence | SEQ ID |
|---|---|---|
| hNFKBIA_gRNA_1 | CGTCCGCGCCATGTTCCAGG | 845 |
| hNFKBIA_gRNA_2 | TGGTTTCAGGAGCCCTGTAA | 846 |
| hNFKBIA_gRNA_3 | ACCCGGATACAGCAGCAGCT | 847 |
| hNFKBIA_gRNA_4 | TTCCAGGGCTCCGAGCCGCG | 848 |
| hNFKBIA_gRNA_5 | CTGAAGGCTACCAACTACAA | 849 |
| hNFKBIA_gRNA_6 | GGGTATTTCCTCGAAAGTCT | 850 |
| hNFKBIA_gRNA_7 | GAGCCGCAGGAGGTGCCGCG | 851 |
| hNFKBIA_gRNA_8 | CTGAGTCAGGACTCCCACGC | 852 |
| hNFKBIA_gRNA_9 | CACTTACGAGTCCCCGTCCT | 853 |
| hNFKBIA_gRNA_10 | CTCAAATTCCTTTTGGTTTC | 854 |
| hNFKBIA_gRNA_11 | GGTTGGTGATCACAGCCAAG | 855 |
| hNFKBIA_gRNA_12 | GCAGGTTGTTCTGGAAGTTG | 856 |

TABLE 37
Exemplary murine Nfkbia gRNA sequences

| Target | Sequence | SEQ ID |
|---|---|---|
| mNfkbia_gRNA_1 | CCTCGAAAGTCTCGGAGCTC | 857 |
| mNfkbia_gRNA_2 | CTGCGTCAAGACTGCTACAC | 858 |
| mNfkbia_gRNA_3 | TGCTCACAGGCAAGATGTAG | 859 |
| mNfkbia_gRNA_4 | CCGGACAGCCCTCCACCTTG | 860 |
| mNfkbia_gRNA_5 | AGACCTACCATTGTAGTTGG | 861 |
| mNfkbia_gRNA_6 | CCAAGTGCTCCACGATGGCC | 862 |
| mNfkbia_gRNA_7 | AGCCTCTATCCACGGCTACC | 863 |
| mNfkbia_gRNA_8 | GCCCCAGGTAAGCTGGTAGG | 864 |
| mNfkbia_gRNA_9 | GCAAGCAGCGCACCTGCTGC | 865 |
| mNfkbia_gRNA_10 | TCAAGACTGCTACACTGGCC | 866 |
| mNfkbia_gRNA_11 | GCAGGTTGTTCTGGAAGTTG | 867 |
| mNfkbia_gRNA_12 | GGGTGCTGATGTCAACGCTC | 868 |
| mNfkbia_gRNA_13 | CCACGATGGCCAGGTAGCCG | 869 |
| mNfkbia_gRNA_14 | TGGTCAGCGGCTTCTCTTCG | 870 |
| mNfkbia_gRNA_15 | AATGTGGGGCTGATGTCAAC | 871 |
| mNfkbia_gRNA_16 | ATTTCAACAAGAGCGAAACC | 872 |
| mNfkbia_gRNA_17 | CACCTGACCAATGACTTCCA | 873 |
| mNfkbia_gRNA_18 | GCCCTGGAAGCAGCAGCTCA | 874 |
| mNfkbia_gRNA_19 | GCTCACAGGCAAGATGTAGA | 875 |

[0667] In some embodiments, the gene-regulating system comprises at least two gRNA molecules, wherein at least one gRNA molecule is a SOCS1-targeting gRNA molecule and at least one gRNA molecule is a PTPN2-targeting gRNA molecule. In some embodiments, the at least one SOCS1-targeting gRNA molecule binds to a target DNA sequence that is at least 95%, 96%, 97%, 98%, or 99% identical to a DNA sequence in the SOCS1 gene (SEQ ID NO: 1) or the Socs1 gene (SEQ ID NO: 2) and the at least one PTPN2-targeting gRNA molecule binds to a target DNA sequence that is at least 95%, 96%, 97%, 98%, or 99% identical to a DNA sequence in the PTPN2 gene (SEQ ID NO: 3) or the Ptpn2 gene (SEQ ID NO: 4). In some embodiments, the at least one SOCS1-targeting gRNA molecule binds to a target DNA sequence that is 100% identical to a DNA sequence in the SOCS1 gene (SEQ ID NO: 1) or the Socs1 gene (SEQ ID NO: 2) and the at least one PTPN2-targeting gRNA molecule binds to a target DNA sequence that is 100% identical to a DNA sequence in the PTPN2 gene (SEQ ID NO: 3) or the Ptpn2 gene (SEQ ID NO: 4).

[0668] In some embodiments, the at least one SOCS1-targeting gRNA molecule binds to a target DNA sequence that is at least 95%, 96%, 97%, 98%, or 99% identical to a DNA sequence defined by a set of genomic coordinates shown in Table 4 or Table 5 and the at least one PTPN2-targeting gRNA molecule binds to a target DNA sequence that is at least 95%, 96%, 97%, 98%, or 99% identical to a DNA sequence defined by a set of genomic coordinates shown in Table 9 or Table 10. In some embodiments, the at least one SOCS1-targeting gRNA molecule binds to a target DNA sequence that is 100% identical to a DNA sequence encoded by a DNA sequence defined by a set of genomic coordinates shown in Table 4 or Table 5 and the at least one PTPN2-targeting gRNA molecule binds to a target DNA sequence that is 100% identical to a DNA sequence encoded by a DNA sequence defined by a set of genomic coordinates shown in Table 9 or Table 10.

[0669] In some embodiments, the at least one SOCS1-targeting gRNA molecule binds to a target DNA sequence that is at least 95%, 96%, 97%, 98%, or 99% identical to one of SEQ ID NOs: 23-200, 56-200 or 56-187 and the at least one PTPN2-targeting gRNA molecule binds to a target DNA sequence that is at least 95%, 96%, 97%, 98%, or 99% identical to one of SEQ ID NOs: 201-327 or 201-314. In some embodiments, the at least one SOCS1-targeting gRNA molecule binds to a target DNA sequence that is 100% identical to one of SEQ ID NOs: 23-200, 56-200 or 56-187 and the at least one PTPN2-targeting gRNA molecule binds to a target DNA sequence that is 100% identical to one of SEQ ID NOs: 201-327 or 201-314.

[0670] In some embodiments, the at least one SOCS1-targeting gRNA molecule is encoded by a DNA sequence that is at least 95%, 96%, 97%, 98%, or 99% identical to one of SEQ ID NOs: 23-200, 56-200 or 56-187 and the at least one PTPN2-targeting gRNA molecule is encoded by a DNA sequence that is at least 95%, 96%, 97%, 98%, or 99% identical to one of SEQ ID NOs: 201-327 or 201-314. In some embodiments, the at least one SOCS1-targeting gRNA molecule is encoded by a DNA sequence that is 100% identical to one of SEQ ID NOs: 23-200, 56-200 or 56-187 and the at least one PTPN2-targeting gRNA molecule is encoded by a DNA sequence that is 100% identical to one of SEQ ID NOs: 201-327 or 201-314.

[0671] In some embodiments, the gene-regulating system comprises at least two gRNA molecules, wherein at least one gRNA molecule is a SOCS1-targeting gRNA molecule and at least one gRNA molecule is a ZC3H12A-targeting gRNA molecule. In some embodiments, the at least one SOCS1-targeting gRNA molecule binds to a target DNA sequence that is at least 95%, 96%, 97%, 98%, or 99% identical to a DNA sequence in the SOCS1 gene (SEQ ID NO: 1) or the Socs1 gene (SEQ ID NO: 2) and the at least one ZC3H12A-targeting gRNA molecule binds to a target DNA sequence that is at least 95%, 96%, 97%, 98%, or 99% identical to a DNA sequence in the ZC3H12A gene (SEQ ID NO: 5) or the Zc3h12a gene (SEQ ID NO: 6). In some embodiments, the at least one SOCS1-targeting gRNA molecule binds to a target DNA sequence that is 100% identical to a DNA sequence in the SOCS1 gene (SEQ ID NO: 1) or the Socs1 gene (SEQ ID NO: 2) and the at least one ZC3H12A-targeting gRNA molecule binds to a target DNA sequence that is 100% identical to a DNA sequence in the ZC3H12A gene (SEQ ID NO: 5) or the Zc3h12a gene (SEQ ID NO: 6).

[0672] In some embodiments, the at least one SOCS1-targeting gRNA molecule binds to a target DNA sequence that is at least 95%, 96%, 97%, 98%, or 99% identical to a DNA sequence defined by a set of genomic coordinates shown in Table 4 or Table 5 and the at least one ZC3H12A-targeting gRNA molecule binds to a target DNA sequence that is at least 95%, 96%, 97%, 98%, or 99% identical to a DNA sequence defined by a set of genomic coordinates shown in Table 11 or Table 12. In some embodiments, the at least one SOCS1-targeting gRNA molecule binds to a target DNA sequence that is 100% identical to a DNA sequence encoded by a DNA sequence defined by a set of genomic coordinates shown in Table 4 or Table 5 and the at least one ZC3H12A-targeting gRNA molecule binds to a target DNA sequence that is 100% identical to a DNA sequence encoded by a DNA sequence defined by a set of genomic coordinates shown in Table 11 or Table 12.

[0673] In some embodiments, the at least one SOCS1-targeting gRNA molecule binds to a target DNA sequence that is at least 95%, 96%, 97%, 98%, or 99% identical to one of SEQ ID NOs: 23-200, 56-200 or 56-187 and the at least one ZC3H12A-targeting gRNA molecule binds to a target DNA sequence that is at least 95%, 96%, 97%, 98%, or 99% identical to one of SEQ ID NOs: 331-797, 338-797 or 338-789. In some embodiments, the at least one SOCS1-targeting gRNA molecule binds to a target DNA sequence that is 100% identical to one of SEQ ID NOs: 23-200, 56-200 or 56-187 and the at least one ZC3H12A-targeting gRNA molecule binds to a target DNA sequence that is 100% identical to one of SEQ ID NOs: 331-797, 338-797 or 338-789.

[0674] In some embodiments, the at least one SOCS1-targeting gRNA molecule is encoded by a DNA sequence that is at least 95%, 96%, 97%, 98%, or 99% identical to one of SEQ ID NOs: 23-200, 56-200 or 56-187 and the at least one ZC3H12A-targeting gRNA molecule is encoded by a DNA sequence that is at least 95%, 96%, 97%, 98%, or 99% identical to one of SEQ ID NOs: 331-797, 338-797 or 338-789. In some embodiments, the at least one SOCS1-targeting gRNA molecule is encoded by a DNA sequence that is 100% identical to one of SEQ ID NOs: 23-200, 56-200 or 56-187 and the at least one ZC3H12A-targeting gRNA molecule is encoded by a DNA sequence that is 100% identical to one of SEQ ID NOs: 331-797, 338-797 or 338-789.

[0675] In some embodiments, the gene-regulating system comprises at least two gRNA molecules, wherein at least one gRNA molecule is a PTPN2-targeting gRNA molecule and at least one gRNA molecule is a ZC3H12A-targeting gRNA molecule. In some embodiments, the at least one PTPN2-targeting gRNA molecule binds to a target DNA sequence that is at least 95%, 96%, 97%, 98%, or 99% identical to a DNA sequence in the PTPN2 gene (SEQ ID NO: 3) or the Ptpn2 gene (SEQ ID NO: 4) and the at least one ZC3H12A-targeting gRNA molecule binds to a target DNA sequence that is at least 95%, 96%, 97%, 98%, or 99% identical to a DNA sequence in the ZC3H12A gene (SEQ ID NO: 5) or the Zc3h12a gene (SEQ ID NO: 6). In some embodiments, the at least one PTPN2-targeting gRNA molecule binds to a target DNA sequence that is 100% identical to a DNA sequence in the PTPN2 gene (SEQ ID NO: 3) or the Ptpn2 gene (SEQ ID NO: 4) and the at least one ZC3H12A-targeting gRNA molecule binds to a target DNA sequence that is 100% identical to a DNA sequence in the ZC3H12A gene (SEQ ID NO: 5) or the Zc3h12a gene (SEQ ID NO: 6).

[0676] In some embodiments, the at least one PTPN2-targeting gRNA molecule binds to a target DNA sequence that is at least 95%, 96%, 97%, 98%, or 99% identical to a DNA sequence defined by a set of genomic coordinates shown in Table 9 or Table 10 and the at least one ZC3H12A-targeting gRNA molecule binds to a target DNA sequence that is at least 95%, 96%, 97%, 98%, or 99% identical to a DNA sequence defined by a set of genomic coordinates shown in Table 11 or Table 12. In some embodiments, the at least one PTPN2-targeting gRNA molecule binds to a target DNA sequence that is 100% identical to a DNA sequence encoded by a DNA sequence defined by a set of genomic coordinates shown in Table 9 or Table 10 and the at least one ZC3H12A-targeting gRNA molecule binds to a target DNA sequence that is 100% identical to a DNA sequence encoded by a DNA sequence defined by a set of genomic coordinates shown in Table 11 or Table 12.

[0677] In some embodiments, the at least one PTPN2-targeting gRNA molecule binds to a target DNA sequence that is at least 95%, 96%, 97%, 98%, or 99% identical to one of SEQ ID NOs: 201-327 or 201-314 and the at least one ZC3H12A-targeting gRNA molecule binds to a target DNA sequence that is at least 95%, 96%, 97%, 98%, or 99% identical to one of SEQ ID NOs: 331-797, 338-797 or 338-789. In some embodiments, the at least one PTPN2-targeting gRNA molecule binds to a target DNA sequence that is 100% identical to one of SEQ ID NOs: 201-327 or 201-314 and the at least one ZC3H12A-targeting gRNA molecule binds to a target DNA sequence that is 100% identical to one of SEQ ID NOs: 331-797, 338-797 or 338-789.

[0678] In some embodiments, the at least one PTPN2-targeting gRNA molecule is encoded by a DNA sequence that is at least 95%, 96%, 97%, 98%, or 99% identical to one of SEQ ID NOs: 201-327 or 201-314 and the at least one ZC3H12A-targeting gRNA molecule is encoded by a DNA sequence that is at least 95%, 96%, 97%, 98%, or 99% identical to one of SEQ ID NOs: 331-797, 338-797 or 338-789. In some embodiments, the at least one PTPN2-targeting gRNA molecule is encoded by a DNA sequence that is 100% identical to one of SEQ ID NOs: 201-327 or 201-314 and the at least one ZC3H12A-targeting gRNA molecule is encoded by a DNA sequence that is 100% identical to one of SEQ ID NOs: 331-797, 338-797 or 338-789.

[0679] In some embodiments, the gene-regulating system comprises at least two gRNA molecules, wherein at least one gRNA molecule is a CBLB-targeting gRNA molecule and at least one gRNA molecule is a PTPN2-targeting gRNA molecule. In some embodiments, the at least one CBLB-targeting gRNA molecule binds to a target DNA sequence that is at least 95%, 96%, 97%, 98%, or 99% identical to a DNA sequence in the CBLB gene (SEQ ID NO: 7) or the CBLB gene (SEQ ID NO: 8) and the at least one PTPN2-targeting gRNA molecule binds to a target DNA sequence that is at least 95%, 96%, 97%, 98%, or 99% identical to a DNA sequence in the PTPN2 gene (SEQ ID NO: 3) or the Ptpn2 gene (SEQ ID NO: 4). In some embodiments, the at least one CBLB-targeting gRNA molecule binds to a target DNA sequence that is 100% identical to a DNA sequence in the CBLB gene (SEQ ID NO: 7) or the Cblb gene (SEQ ID NO: 8) and the at least one PTPN2-targeting gRNA molecule binds to a target DNA sequence that is 100% identical to a DNA sequence in the PTPN2 gene (SEQ ID NO: 3) or the Ptpn2 gene (SEQ ID NO: 4).

[0680] In some embodiments, the at least one CBLB-targeting gRNA molecule binds to a target DNA sequence that is at least 95%, 96%, 97%, 98%, or 99% identical to a DNA sequence defined by a set of genomic coordinates shown in Table 17 or Table 18 and the at least one PTPN2-targeting gRNA molecule binds to a target DNA sequence that is at least 95%, 96%, 97%, 98%, or 99% identical to a DNA sequence defined by a set of genomic coordinates shown in Table 9 or Table 10. In some embodiments, the at least one CBLB-targeting gRNA molecule binds to a target DNA sequence that is 100% identical to a DNA sequence encoded by a DNA sequence defined by a set of genomic coordinates shown in Table 17 or Table 18 and the at least one PTPN2-targeting gRNA molecule binds to a target DNA sequence that is 100% identical to a DNA sequence encoded by a DNA sequence defined by a set of genomic coordinates shown in Table 9 or Table 10.

[0681] In some embodiments, the at least one CBLB-targeting gRNA molecule binds to a target DNA sequence that is at least 95%, 96%, 97%, 98%, or 99% identical to one of SEQ ID NOs: 798-823 or 798-808 and the at least one PTPN2-targeting gRNA molecule binds to a target DNA sequence that is at least 95%, 96%, 97%, 98%, or 99% identical to one of SEQ ID NOs: 201-327 or 201-314. In some embodiments, the at least one CBLB-targeting gRNA molecule binds to a target DNA sequence that is 100% identical to one of SEQ ID NOs: 798-823 or 798-808 and the at least one PTPN2-targeting gRNA molecule binds to a target DNA sequence that is 100% identical to one of SEQ ID NOs: 201-327 or 201-314.

[0682] In some embodiments, the at least one CBLB-targeting gRNA molecule is encoded by a DNA sequence that is at least 95%, 96%, 97%, 98%, or 99% identical to one of SEQ ID NOs: 798-823 or 798-808 and the at least one PTPN2-targeting gRNA molecule is encoded by a DNA sequence that is at least 95%, 96%, 97%, 98%, or 99% identical to one of SEQ ID NOs: 201-327 or 201-314. In some embodiments, the at least one CBLB-targeting gRNA molecule is encoded by a DNA sequence that is 100% identical to one of SEQ ID NOs: 798-823 or 798-808 and the at least one PTPN2-targeting gRNA molecule is encoded by a DNA sequence that is 100% identical to one of SEQ ID NOs: 201-327 or 201-314.

[0683] In some embodiments, the gene-regulating system comprises at least two gRNA molecules, wherein at least one gRNA molecule is a CBLB-targeting gRNA molecule and at least one gRNA molecule is a ZC3H12A-targeting gRNA molecule. In some embodiments, the at least one CBLB-targeting gRNA molecule binds to a target DNA sequence that is at least 95%, 96%, 97%, 98%, or 99% identical to a DNA sequence in the CBLB gene (SEQ ID NO: 7) or the Cblb gene (SEQ ID NO: 8) and the at least one ZC3H12A-targeting gRNA molecule binds to a target DNA sequence that is at least 95%, 96%, 97%, 98%, or 99% identical to a DNA sequence in the ZC3H12A gene (SEQ ID NO: 5) or the Zc3h12a gene (SEQ ID NO: 6). In some embodiments, the at least one CBLB-targeting gRNA molecule binds to a target DNA sequence that is 100% identical to a DNA sequence in the CBLB gene (SEQ ID NO: 7) or the Cblb gene (SEQ ID NO: 8) and the at least one ZC3H12A-targeting gRNA molecule binds to a target DNA sequence that is 100% identical to a DNA sequence in the ZC3H12A gene (SEQ ID NO: 5) or the Zc3h12a gene (SEQ ID NO: 6).

[0684] In some embodiments, the at least one CBLB-targeting gRNA molecule binds to a target DNA sequence that is at least 95%, 96%, 97%, 98%, or 99% identical to a DNA sequence defined by a set of genomic coordinates shown in Table 17 or Table 18 and the at least one ZC3H12A-targeting gRNA molecule binds to a target DNA sequence that is at least 95%, 96%, 97%, 98%, or 99% identical to a DNA sequence defined by a set of genomic coordinates shown in Table 11 or Table 12. In some embodiments, the at least one CBLB-targeting gRNA molecule binds to a target DNA sequence that is 100% identical to a DNA sequence encoded by a DNA sequence defined by a set of genomic coordinates shown in Table 17 or Table 18 and the at least one ZC3H12A-targeting gRNA molecule binds to a target DNA sequence that is 100% identical to a DNA sequence encoded by a DNA sequence defined by a set of genomic coordinates shown in Table 11 or Table 12.

[0685] In some embodiments, the at least one CBLB-targeting gRNA molecule binds to a target DNA sequence that is at least 95%, 96%, 97%, 98%, or 99% identical to one of SEQ ID NOs: 798-823 or 798-808 and the at least one ZC3H12A-targeting gRNA molecule binds to a target DNA sequence that is at least 95%, 96%, 97%, 98%, or 99% identical to one of SEQ ID NOs: 331-797, 338-797 or 338-789. In some embodiments, the at least one CBLB-targeting gRNA molecule binds to a target DNA sequence that is 100% identical to one of SEQ ID NOs: 798-823 or 798-808 and the at least one ZC3H12A-targeting gRNA molecule binds to a target DNA sequence that is 100% identical to one of SEQ ID NOs: 331-797, 338-797 or 338-789.

[0686] In some embodiments, the at least one CBLB-targeting gRNA molecule is encoded by a DNA sequence that is at least 95%, 96%, 97%, 98%, or 99% identical to one of SEQ ID NOs: 798-823 or 798-808 and the at least one ZC3H12A-targeting gRNA molecule is encoded by a DNA sequence that is at least 95%, 96%, 97%, 98%, or 99% identical to one of SEQ ID NOs: 331-797, 338-797 or 338-789. In some embodiments, the at least one CBLB-targeting gRNA molecule is encoded by a DNA sequence that is 100% identical to one of SEQ ID NOs: 798-823 or 798-808 and the at least one ZC3H12A-targeting gRNA molecule is encoded by a DNA sequence that is 100% identical to one of SEQ ID NOs: 331-797, 338-797 or 338-789.

[0687] In some embodiments, the gene-regulating system comprises at least two gRNA molecules, wherein at least one gRNA molecule is a SOCS1-targeting gRNA molecule and at least one gRNA molecule is a CBLB-targeting gRNA molecule. In some embodiments, the at least one SOCS1-targeting gRNA molecule binds to a target DNA sequence that is at least 95%, 96%, 97%, 98%, or 99% identical to a DNA sequence in the SOCS1 gene (SEQ ID NO: 1) or the Socs1 gene (SEQ ID NO: 2) and the at least one CBLB-targeting gRNA molecule binds to a target DNA sequence that is at least 95%, 96%, 97%, 98%, or 99% identical to a DNA sequence in the CBLB gene (SEQ ID NO: 7) or the Cblb gene (SEQ ID NO: 8). In some embodiments, the at least one SOCS1-targeting gRNA molecule binds to a target DNA sequence that is 100% identical to a DNA sequence in the SOCS1 gene (SEQ ID NO: 1) or the Socs1 gene (SEQ ID NO: 2) and the at least one CBLB-targeting gRNA molecule binds to a target DNA sequence that is 100% identical to a DNA sequence in the CBLB gene (SEQ ID NO: 7) or the Cblb gene (SEQ ID NO: 8).

[0688] In some embodiments, the at least one SOCS1-targeting gRNA molecule binds to a target DNA sequence that is at least 95%, 96%, 97%, 98%, or 99% identical to a DNA sequence defined by a set of genomic coordinates shown in Table 4 or Table 5 and the at least one CBLB-targeting gRNA molecule binds to a target DNA sequence that is at least 95%, 96%, 97%, 98%, or 99% identical to a DNA sequence defined by a set of genomic coordinates shown in Table 17 or Table 18. In some embodiments, the at least one SOCS1-targeting gRNA molecule binds to a target DNA sequence that is 100% identical to a DNA sequence encoded by a DNA sequence defined by a set of genomic coordinates shown in Table 4 or Table 5 and the at least one CBLB-targeting gRNA molecule binds to a target DNA sequence that is 100% identical to a DNA sequence encoded by a DNA sequence defined by a set of genomic coordinates shown in Table 17 or Table 18.

[0689] In some embodiments, the at least one SOCS1-targeting gRNA molecule binds to a target DNA sequence that is at least 95%, 96%, 97%, 98%, or 99% identical to one of SEQ ID NOs: 23-200, 56-200 or 56-187 and the at least one CBLB-targeting gRNA molecule binds to a target DNA sequence that is at least 95%, 96%, 97%, 98%, or 99% identical to one of SEQ ID NOs: 798-823 or 798-808. In some embodiments, the at least one SOCS1-targeting gRNA molecule binds to a target DNA sequence that is 100% identical to one of SEQ ID NOs: 23-200, 56-200 or 56-187 and the at least one CBLB-targeting gRNA molecule binds to a target DNA sequence that is 100% identical to one of SEQ ID NOs: 798-823 or 798-808.

[0690] In some embodiments, the at least one SOCS1-targeting gRNA molecule is encoded by a DNA sequence that is at least 95%, 96%, 97%, 98%, or 99% identical to one of SEQ ID NOs: 23-200, 56-200 or 56-187 and the at least one CBLB-targeting gRNA molecule is encoded by a DNA sequence that is at least 95%, 96%, 97%, 98%, or 99% identical to one of SEQ ID NOs: 798-823 or 798-808. In some embodiments, the at least one SOCS1-targeting gRNA molecule is encoded by a DNA sequence that is 100% identical to one of SEQ ID NOs: 23-200, 56-200 or 56-187 and the at least one CBLB-targeting gRNA molecule is encoded by a DNA sequence that is 100% identical to one of SEQ ID NOs: 798-823 or 798-808.

[0691] In some embodiments, the gene-regulating system comprises at least two gRNA molecules, wherein at least one gRNA molecule is a RC3H1-targeting gRNA molecule and at least one gRNA molecule is a PTPN2-targeting gRNA molecule. In some embodiments, the at least one RC3H1-targeting gRNA molecule binds to a target DNA sequence that is at least 95%, 96%, 97%, 98%, or 99% identical to a DNA sequence in the RC3H1 gene (SEQ ID NO: 9) or the Rc3h1 gene (SEQ ID NO: 10) and the at least one PTPN2-targeting gRNA molecule binds to a target DNA sequence that is at least 95%, 96%, 97%, 98%, or 99% identical to a DNA sequence in the PTPN2 gene (SEQ ID NO: 3) or the Ptpn2 gene (SEQ ID NO: 4). In some embodiments, the at least one RC3H1-targeting gRNA molecule binds to a target DNA sequence that is 100% identical to a DNA sequence in the RC3H1 gene (SEQ ID NO: 9) or the Rc3h1 gene (SEQ ID NO: 10) and the at least one PTPN2-targeting gRNA molecule binds to a target DNA sequence that is 100% identical to a DNA sequence in the PTPN2 gene (SEQ ID NO: 3) or the Ptpn2 gene (SEQ ID NO: 4).

[0692] In some embodiments, the at least one RC3H1-targeting gRNA molecule binds to a target DNA sequence that is at least 95%, 96%, 97%, 98%, or 99% identical to a DNA sequence defined by a set of genomic coordinates shown in Table 19 or Table 20 and the at least one PTPN2-targeting gRNA molecule binds to a target DNA sequence that is at least 95%, 96%, 97%, 98%, or 99% identical to a DNA sequence defined by a set of genomic coordinates shown in Table 9 or Table 10. In some embodiments, the at least one RC3H1-targeting gRNA molecule binds to a target DNA sequence that is 100% identical to a DNA sequence encoded by a DNA sequence defined by a set of genomic coordinates shown in Table 19 or Table 20 and the at least one PTPN2-targeting gRNA molecule binds to a target DNA sequence that is 100% identical to a DNA sequence encoded by a DNA sequence defined by a set of genomic coordinates shown in Table 9 or Table 10.

[0693] In some embodiments, the at least one RC3H1-targeting gRNA molecule binds to a target DNA sequence that is at least 95%, 96%, 97%, 98%, or 99% identical to one of SEQ ID NOs: 824-844 or 824-836 and the at least one PTPN2-targeting gRNA molecule binds to a target DNA sequence that is at least 95%, 96%, 97%, 98%, or 99% identical to one of SEQ ID NOs: 201-327 or 201-314. In some embodiments, the at least one RC3H1-targeting gRNA molecule binds to a target DNA sequence that is 100% identical to one of SEQ ID NOs: 824-844 or 824-836 and the at least one PTPN2-targeting gRNA molecule binds to a target DNA sequence that is 100% identical to one of SEQ ID NOs: 201-327 or 201-314.

[0694] In some embodiments, the at least one RC3H1-targeting gRNA molecule is encoded by a DNA sequence that is at least 95%, 96%, 97%, 98%, or 99% identical to one of SEQ ID NOs: 824-844 or 824-836 and the at least one PTPN2-targeting gRNA molecule is encoded by a DNA sequence that is at least 95%, 96%, 97%, 98%, or 99% identical to one of SEQ ID NOs: 201-327 or 201-314. In some embodiments, the at least one RC3H1-targeting gRNA molecule is encoded by a DNA sequence that is 100% identical to one of SEQ ID NOs: 824-844 or 824-836 and the at least one PTPN2-targeting gRNA molecule is encoded by a DNA sequence that is 100% identical to one of SEQ ID NOs: 201-327 or 201-314.

[0695] In some embodiments, the gene-regulating system comprises at least two gRNA molecules, wherein at least one gRNA molecule is a RC3H1-targeting gRNA molecule and at least one gRNA molecule is a ZC3H12A-targeting gRNA molecule. In some embodiments, the at least one RC3H1-targeting gRNA molecule binds to a target DNA sequence that is at least 95%, 96%, 97%, 98%, or 99% identical to a DNA sequence in the RC3H1 gene (SEQ ID NO: 9) or the Rc3h1 gene (SEQ ID NO: 10) and the at least one ZC3H12A-targeting gRNA molecule binds to a target DNA sequence that is at least 95%, 96%, 97%, 98%, or 99% identical to a DNA sequence in the ZC3H12A gene (SEQ ID NO: 5) or the Zc3h12a gene (SEQ ID NO: 6). In some embodiments, the at least one RC3H1-targeting gRNA molecule binds to a target DNA sequence that is 100% identical to a DNA sequence in the RC3H1 gene (SEQ ID NO: 9) or the Rc3h1 gene (SEQ ID NO: 10) and the at least one ZC3H12A-targeting gRNA molecule binds to a target DNA sequence that is 100% identical to a DNA sequence in the ZC3H12A gene (SEQ ID NO: 5) or the Zc3h12a gene (SEQ ID NO: 6).

[0696] In some embodiments, the at least one RC3H1-targeting gRNA molecule binds to a target DNA sequence that is at least 95%, 96%, 97%, 98%, or 99% identical to a DNA sequence defined by a set of genomic coordinates shown in Table 19 or Table 20 and the at least one ZC3H12A-targeting gRNA molecule binds to a target DNA sequence that is at least 95%, 96%, 97%, 98%, or 99% identical to a DNA sequence defined by a set of genomic coordinates shown in Table 11 or Table 12. In some embodiments, the at least one RC3H1-targeting gRNA molecule binds to a target DNA sequence that is 100% identical to a DNA sequence encoded by a DNA sequence defined by a set of genomic coordinates shown in Table 19 or Table 20 and the at least one ZC3H12A-targeting gRNA molecule binds to a target DNA sequence that is 100% identical to a DNA sequence encoded by a DNA sequence defined by a set of genomic coordinates shown in Table 11 or Table 12.

[0697] In some embodiments, the at least one RC3H1-targeting gRNA molecule binds to a target DNA sequence that is at least 95%, 96%, 97%, 98%, or 99% identical to one of SEQ ID NOs: 824-844 or 824-836 and the at least one ZC3H12A-targeting gRNA molecule binds to a target DNA sequence that is at least 95%, 96%, 97%, 98%, or 99% identical to one of SEQ ID NOs: 331-797, 338-797 or 338-789. In some embodiments, the at least one RC3H1-targeting gRNA molecule binds to a target DNA sequence that is 100% identical to one of SEQ ID NOs: 824-844 or 824-836 and the at least one ZC3H12A-targeting gRNA molecule binds to a target DNA sequence that is 100% identical to one of SEQ ID NOs: 331-797, 338-797 or 338-789.

[0698] In some embodiments, the at least one RC3H1-targeting gRNA molecule is encoded by a DNA sequence that is at least 95%, 96%, 97%, 98%, or 99% identical to one of SEQ ID NOs: 824-844 or 824-836 and the at least one ZC3H12A-targeting gRNA molecule is encoded by a DNA sequence that is at least 95%, 96%, 97%, 98%, or 99% identical to one of SEQ ID NOs: 331-797, 338-797 or 338-789. In some embodiments, the at least one RC3H1-targeting gRNA molecule is encoded by a DNA sequence that is 100% identical to one of SEQ ID NOs: 824-844 or 824-836 and the at least one ZC3H12A-targeting gRNA molecule is encoded by a DNA sequence that is 100% identical to one of SEQ ID NOs: 331-797, 338-797 or 338-789.

[0699] In some embodiments, the gene-regulating system comprises at least two gRNA molecules, wherein at least one gRNA molecule is a SOCS1-targeting gRNA molecule and at least one gRNA molecule is a RC3H1-targeting gRNA molecule. In some embodiments, the at least one SOCS1-targeting gRNA molecule binds to a target DNA sequence that is at least 95%, 96%, 97%, 98%, or 99% identical to a DNA sequence in the SOCS1 gene (SEQ ID NO: 1) or the Socs1 gene (SEQ ID NO: 2) and the at least one RC3H1-targeting gRNA molecule binds to a target DNA sequence that is at least 95%, 96%, 97%, 98%, or 99% identical to a DNA sequence in the RC3H1 gene (SEQ ID NO: 9) or the Rc3h1 gene (SEQ ID NO: 10). In some embodiments, the at least one SOCS1-targeting gRNA molecule binds to a target DNA sequence that is 100% identical to a DNA sequence in the SOCS1 gene (SEQ ID NO: 1) or the Socs1 gene (SEQ ID NO: 2) and the at least one RC3H1-targeting gRNA molecule binds to a target DNA sequence that is 100% identical to a DNA sequence in the RC3H1 gene (SEQ ID NO: 9) or the Rc3h1 gene (SEQ ID NO: 10).

[0700] In some embodiments, the at least one SOCS1-targeting gRNA molecule binds to a target DNA sequence that is at least 95%, 96%, 97%, 98%, or 99% identical to a DNA sequence defined by a set of genomic coordinates shown in Table 4 or Table 5 and the at least one RC3H1-targeting gRNA molecule binds to a target DNA sequence that is at least 95%, 96%, 97%, 98%, or 99% identical to a DNA sequence defined by a set of genomic coordinates shown in Table 19 or Table 20. In some embodiments, the at least one SOCS1-targeting gRNA molecule binds to a target DNA sequence that is 100% identical to a DNA sequence encoded by a DNA sequence defined by a set of genomic coordinates shown in Table 4 or Table 5 and the at least one RC3H1-targeting gRNA molecule binds to a target DNA sequence that is 100% identical to a DNA sequence encoded by a DNA sequence defined by a set of genomic coordinates shown in Table 19 or Table 20.

[0701] In some embodiments, the at least one SOCS1-targeting gRNA molecule binds to a target DNA sequence that is at least 95%, 96%, 97%, 98%, or 99% identical to one of SEQ ID NOs: 23-200, 56-200 or 56-187 and the at least one RC3H1-targeting gRNA molecule binds to a target DNA sequence that is at least 95%, 96%, 97%, 98%, or 99% identical to one of SEQ ID NOs: 824-844 or 824-836. In some embodiments, the at least one SOCS1-targeting gRNA molecule binds to a target DNA sequence that is 100% identical to one of SEQ ID NOs: 23-200, 56-200 or 56-187 and the at least one RC3H1-targeting gRNA molecule binds to a target DNA sequence that is 100% identical to one of SEQ ID NOs: 824-844 or 824-836.

[0702] In some embodiments, the at least one SOCS1-targeting gRNA molecule is encoded by a DNA sequence that is at least 95%, 96%, 97%, 98%, or 99% identical to one of SEQ ID NOs: 23-200, 56-200 or 56-187 and the at least one RC3H1-targeting gRNA molecule is encoded by a DNA sequence that is at least 95%, 96%, 97%, 98%, or 99% identical to one of SEQ ID NOs: 824-844 or 824-836. In some embodiments, the at least one SOCS1-targeting gRNA molecule is encoded by a DNA sequence that is 100% identical to one of SEQ ID NOs: 23-200, 56-200 or 56-187 and the at least one RC3H1-targeting gRNA molecule is encoded by a DNA sequence that is 100% identical to one of SEQ ID NOs: 824-844 or 824-836.

[0703] In some embodiments, the gene-regulating system comprises at least two gRNA molecules, wherein at least one gRNA molecule is a CBLB-targeting gRNA molecule and at least one gRNA molecule is a RC3H1-targeting gRNA molecule. In some embodiments, the at least one CBLB-targeting gRNA molecule binds to a target DNA sequence that is at least 95%, 96%, 97%, 98%, or 99% identical to a DNA sequence in the CBLB gene (SEQ ID NO: 7) or the Cblb gene (SEQ ID NO: 8) and the at least one RC3H1-targeting gRNA molecule binds to a target DNA sequence that is at least 95%, 96%, 97%, 98%, or 99% identical to a DNA sequence in the RC3H1 gene (SEQ ID NO: 9) or the Rc3h1 gene (SEQ ID NO: 10). In some embodiments, the at least one CBLB-targeting gRNA molecule binds to a target DNA sequence that is 100% identical to a DNA sequence in the CBLB gene (SEQ ID NO: 7) or the Cblb gene (SEQ ID NO: 8) and the at least one RC3H1-targeting gRNA molecule binds to a target DNA sequence that is 100% identical to a DNA sequence in the RC3H1 gene (SEQ ID NO: 9) or the Rc3h1 gene (SEQ ID NO: 10).

[0704] In some embodiments, the at least one CBLB-targeting gRNA molecule binds to a target DNA sequence that is at least 95%, 96%, 97%, 98%, or 99% identical to a DNA sequence defined by a set of genomic coordinates shown in Table 17 or Table 18 and the at least one RC3H1-targeting gRNA molecule binds to a target DNA sequence that is at least 95%, 96%, 97%, 98%, or 99% identical to a DNA sequence defined by a set of genomic coordinates shown in Table 19 or Table 20. In some embodiments, the at least one CBLB-targeting gRNA molecule binds to a target DNA sequence that is 100% identical to a DNA sequence encoded by a DNA sequence defined by a set of genomic coordinates shown in Table 17 or Table 18 and the at least one RC3H1-targeting gRNA molecule binds to a target DNA sequence that is 100% identical to a DNA sequence encoded by a DNA sequence defined by a set of genomic coordinates shown in Table 19 or Table 20.

[0705] In some embodiments, the at least one CBLB-targeting gRNA molecule binds to a target DNA sequence that is at least 95%, 96%, 97%, 98%, or 99% identical to one of SEQ ID NOs: 798-823 or 798-808 and the at least one RC3H1-targeting gRNA molecule binds to a target DNA sequence that is at least 95%, 96%, 97%, 98%, or 99% identical to one of SEQ ID NOs: 824-844 or 824-836. In some embodiments, the at least one CBLB-targeting gRNA molecule binds to a target DNA sequence that is 100% identical to one of SEQ ID NOs: 798-823 or 798-808 and the at least one RC3H1-targeting gRNA molecule binds to a target DNA sequence that is 100% identical to one of SEQ ID NOs: 824-844 or 824-836.

[0706] In some embodiments, the at least one CBLB-targeting gRNA molecule is encoded by a DNA sequence that is at least 95%, 96%, 97%, 98%, or 99% identical to one of SEQ ID NOs: 798-823 or 798-808 and the at least one RC3H1-targeting gRNA molecule is encoded by a DNA sequence that is at least 95%, 96%, 97%, 98%, or 99% identical to one of SEQ ID NOs: 824-844 or 824-836. In some embodiments, the at least one CBLB-targeting gRNA molecule is encoded by a DNA sequence that is 100% identical to one of SEQ ID NOs: 798-823 or 798-808 and the at least one RC3H1-targeting gRNA molecule is encoded by a DNA sequence that is 100% identical to one of SEQ ID NOs: 824-844 or 824-836.

[0707] In some embodiments, the gene-regulating system comprises at least two gRNA molecules, wherein at least one gRNA molecule is a NFKBIA-targeting gRNA molecule and at least one gRNA molecule is a PTPN2-targeting gRNA molecule. In some embodiments, the at least one NFKBIA-targeting gRNA molecule binds to a target DNA sequence that is at least 95%, 96%, 97%, 98%, or 99% identical to a DNA sequence in the NFKBIA gene (SEQ ID NO: 11) or the Nfkbia gene (SEQ ID NO: 12) and the at least one PTPN2-targeting gRNA molecule binds to a target DNA sequence that is at least 95%, 96%, 97%, 98%, or 99% identical to a DNA sequence in the PTPN2 gene (SEQ ID NO: 3) or the Ptpn2 gene (SEQ ID NO: 4). In some embodiments, the at least one NFKBIA-targeting gRNA molecule binds to a target DNA sequence that is 100% identical to a DNA sequence in the NFKBIA gene (SEQ ID NO: 11) or the Nfkbia gene (SEQ ID NO: 12) and the at least one PTPN2-targeting gRNA molecule binds to a target DNA sequence that is 100% identical to a DNA sequence in the PTPN2 gene (SEQ ID NO: 3) or the Ptpn2 gene (SEQ ID NO: 4).

[0708] In some embodiments, the at least one NFKBIA-targeting gRNA molecule binds to a target DNA sequence that is at least 95%, 96%, 97%, 98%, or 99% identical to a DNA sequence defined by a set of genomic coordinates shown in Table 21 or Table 22 and the at least one PTPN2-targeting gRNA molecule binds to a target DNA sequence that is at least 95%, 96%, 97%, 98%, or 99% identical to a DNA sequence defined by a set of genomic coordinates shown in Table 9 or Table 10. In some embodiments, the at least one NFKBIA-targeting gRNA molecule binds to a target DNA sequence that is 100% identical to a DNA sequence encoded by a DNA sequence defined by a set of genomic coordinates shown in Table 21 or Table 22 and the at least one PTPN2-targeting gRNA molecule binds to a target DNA sequence that is 100% identical to a DNA sequence encoded by a DNA sequence defined by a set of genomic coordinates shown in Table 9 or Table 10.

[0709] In some embodiments, the at least one NFKBIA-targeting gRNA molecule binds to a target DNA sequence that is at least 95%, 96%, 97%, 98%, or 99% identical to one of SEQ ID NOs: 845-875 or 845-856 and the at least one PTPN2-targeting gRNA molecule binds to a target DNA sequence that is at least 95%, 96%, 97%, 98%, or 99% identical to one of SEQ ID NOs: 201-327 or 201-314. In some embodiments, the at least one NFKBIA-targeting gRNA molecule binds to a target DNA sequence that is 100% identical to one of SEQ ID NOs: 845-875 or 845-856 and the at least one PTPN2-targeting gRNA molecule binds to a target DNA sequence that is 100% identical to one of SEQ ID NOs: 201-327 or 201-314.

[0710] In some embodiments, the at least one NFKBIA-targeting gRNA molecule is encoded by a DNA sequence that is at least 95%, 96%, 97%, 98%, or 99% identical to one of SEQ ID NOs: 845-875 or 845-856 and the at least one PTPN2-targeting gRNA molecule is encoded by a DNA sequence that is at least 95%, 96%, 97%, 98%, or 99% identical to one of SEQ ID NOs: 201-327 or 201-314. In some embodiments, the at least one NFKBIA-targeting gRNA molecule is encoded by a DNA sequence that is 100% identical to one of SEQ ID NOs: 845-875 or 845-856 and the at least one PTPN2-targeting gRNA molecule is encoded by a DNA sequence that is 100% identical to one of SEQ ID NOs: 201-327 or 201-314.

[0711] In some embodiments, the gene-regulating system comprises at least two gRNA molecules, wherein at least one gRNA molecule is a NFKBIA-targeting gRNA molecule and at least one gRNA molecule is a ZC3H12A-targeting gRNA molecule. In some embodiments, the at least one NFKBIA-targeting gRNA molecule binds to a target DNA sequence that is at least 95%, 96%, 97%, 98%, or 99% identical to a DNA sequence in the NFKBIA gene (SEQ ID NO: 11) or the Nfkbia gene (SEQ ID NO: 12) and the at least one ZC3H12A-targeting gRNA molecule binds to a target DNA sequence that is at least 95%, 96%, 97%, 98%, or 99% identical to a DNA sequence in the ZC3H12A gene (SEQ ID NO: 5) or the Zc3h12a gene (SEQ ID NO: 6). In some embodiments, the at least one NFKBIA-targeting gRNA molecule binds to a target DNA sequence that is 100% identical to a DNA sequence in the NFKBIA gene (SEQ ID NO: 11) or the Nfkbia gene (SEQ ID NO: 12) and the at least one ZC3H12A-targeting gRNA molecule binds to a target DNA sequence that is 100% identical to a DNA sequence in the ZC3H12A gene (SEQ ID NO: 5) or the Zc3h12a gene (SEQ ID NO: 6).

[0712] In some embodiments, the at least one NFKBIA-targeting gRNA molecule binds to a target DNA sequence that is at least 95%, 96%, 97%, 98%, or 99% identical to a DNA sequence defined by a set of genomic coordinates shown in Table 21 or Table 22 and the at least one ZC3H12A-targeting gRNA molecule binds to a target DNA sequence that is at least 95%, 96%, 97%, 98%, or 99% identical to a DNA sequence defined by a set of genomic coordinates shown in Table 11 or Table 12. In some embodiments, the at least one NFKBIA-targeting gRNA molecule binds to a target DNA sequence that is 100% identical to a DNA sequence encoded by a DNA sequence defined by a set of genomic coordinates shown in Table 21 or Table 22 and the at least one ZC3H12A-targeting gRNA molecule binds to a target DNA sequence that is 100% identical to a DNA sequence encoded by a DNA sequence defined by a set of genomic coordinates shown in Table 11 or Table 12.

[0713] In some embodiments, the at least one NFKBIA-targeting gRNA molecule binds to a target DNA sequence that is at least 95%, 96%, 97%, 98%, or 99% identical to one of SEQ ID NOs: 845-875 or 845-856 and the at least one ZC3H12A-targeting gRNA molecule binds to a target DNA sequence that is at least 95%, 96%, 97%, 98%, or 99% identical to one of SEQ ID NOs: 331-797, 338-797 or 338-789. In some embodiments, the at least one NFKBIA-targeting gRNA molecule binds to a target DNA sequence that is 100% identical to one of SEQ ID NOs: 845-875 or 845-856 and the at least one ZC3H12A-targeting gRNA molecule binds to a target DNA sequence that is 100% identical to one of SEQ ID NOs: 331-797, 338-797 or 338-789.

[0714] In some embodiments, the at least one NFKBIA-targeting gRNA molecule is encoded by a DNA sequence that is at least 95%, 96%, 97%, 98%, or 99% identical to one of SEQ ID NOs: 845-875 or 845-856 and the at least one ZC3H12A-targeting gRNA molecule is encoded by a DNA sequence that is at least 95%, 96%, 97%, 98%, or 99% identical to one of SEQ ID NOs: 331-797, 338-797 or 338-789. In some embodiments, the at least one NFKBIA-targeting gRNA molecule is encoded by a DNA sequence that is 100% identical to one of SEQ ID NOs: 845-875 or 845-856 and the at least one ZC3H12A-targeting gRNA molecule is encoded by a DNA sequence that is 100% identical to one of SEQ ID NOs: 331-797, 338-797 or 338-789.

[0715] In some embodiments, the gene-regulating system comprises at least two gRNA molecules, wherein at least one gRNA molecule is a SOCS1-targeting gRNA molecule and at least one gRNA molecule is a NFKBIA-targeting gRNA molecule. In some embodiments, the at least one SOCS1-targeting gRNA molecule binds to a target DNA sequence that is at least 95%, 96%, 97%, 98%, or 99% identical to a DNA sequence in the SOCS1 gene (SEQ ID NO: 1) or the Socs1 gene (SEQ ID NO: 2) and the at least one NFKBIA-targeting gRNA molecule binds to a target DNA sequence that is at least 95%, 96%, 97%, 98%, or 99% identical to a DNA sequence in the NFKBIA gene (SEQ ID NO: 11) or the Nfkbia gene (SEQ ID NO: 12). In some embodiments, the at least one SOCS1-targeting gRNA molecule binds to a target DNA sequence that is 100% identical to a DNA sequence in the SOCS1 gene (SEQ ID NO: 1) or the Socs1 gene (SEQ ID NO: 2) and the at least one NFKBIA-targeting gRNA molecule binds to a target DNA sequence that is 100% identical to a DNA sequence in the NFKBIA gene (SEQ ID NO: 11) or the Nfkbia gene (SEQ ID NO: 12).

[0716] In some embodiments, the at least one SOCS1-targeting gRNA molecule binds to a target DNA sequence that is at least 95%, 96%, 97%, 98%, or 99% identical to a DNA sequence defined by a set of genomic coordinates shown in Table 4 or Table 5 and the at least one NFKBIA-targeting gRNA molecule binds to a target DNA sequence that is at least 95%, 96%, 97%, 98%, or 99% identical to a DNA sequence defined by a set of genomic coordinates shown in Table 21 or Table 22. In some embodiments, the at least one SOCS1-targeting gRNA molecule binds to a target DNA sequence that is 100% identical to a DNA sequence encoded by a DNA sequence defined by a set of genomic coordinates shown in Table 4 or Table 5 and the at least one NFKBIA-targeting gRNA molecule binds to a target DNA sequence that is 100% identical to a DNA sequence encoded by a DNA sequence defined by a set of genomic coordinates shown in Table 21 or Table 22.

[0717] In some embodiments, the at least one SOCS1-targeting gRNA molecule binds to a target DNA sequence that is at least 95%, 96%, 97%, 98%, or 99% identical to one of SEQ ID NOs: 23-200, 56-200 or 56-187 and the at least one NFKBIA-targeting gRNA molecule binds to a target DNA sequence that is at least 95%, 96%, 97%, 98%, or 99% identical to one of SEQ ID NOs: 845-875 or 845-856. In some embodiments, the at least one SOCS1-targeting gRNA molecule binds to a target DNA sequence that is 100% identical to one of SEQ ID NOs: 23-200, 56-200 or 56-187 and the at least one NFKBIA-targeting gRNA molecule binds to a target DNA sequence that is 100% identical to one of SEQ ID NOs: 845-875 or 845-856.

[0718] In some embodiments, the at least one SOCS1-targeting gRNA molecule is encoded by a DNA sequence that is at least 95%, 96%, 97%, 98%, or 99% identical to one of SEQ ID NOs: 23-200, 56-200 or 56-187 and the at least one NFKBIA-targeting gRNA molecule is encoded by a DNA sequence that is at least 95%, 96%, 97%, 98%, or 99% identical to one of SEQ ID NOs: 845-875 or 845-856. In some embodiments, the at least one SOCS1-targeting gRNA molecule is encoded by a DNA sequence that is 100% identical to one of SEQ ID NOs: 23-200, 56-200 or 56-187 and the at least one NFKBIA-targeting gRNA molecule is encoded by a DNA sequence that is 100% identical to one of SEQ ID NOs: 845-875 or 845-856.

[0719] In some embodiments, the gene-regulating system comprises at least two gRNA molecules, wherein at least one gRNA molecule is a CBLB-targeting gRNA molecule and at least one gRNA molecule is a NFKBIA-targeting gRNA molecule. In some embodiments, the at least one CBLB-targeting gRNA molecule binds to a target DNA sequence that is at least 95%, 96%, 97%, 98%, or 99% identical to a DNA sequence in the CBLB gene (SEQ ID NO: 7) or the Cblb gene (SEQ ID NO: 8) and the at least one NFKBIA-targeting gRNA molecule binds to a target DNA sequence that is at least 95%, 96%, 97%, 98%, or 99% identical to a DNA sequence in the NFKBIA gene (SEQ ID NO: 11) or the Nfkbia gene (SEQ ID NO: 12). In some embodiments, the at least one CBLB-targeting gRNA molecule binds to a target DNA sequence that is 100% identical to a DNA sequence in the CBLB gene (SEQ ID NO: 7) or the Cblb gene (SEQ ID NO: 8) and the at least one NFKBIA-targeting gRNA molecule binds to a target DNA sequence that is 100% identical to a DNA sequence in the NFKBIA gene (SEQ ID NO: 11) or the Nfkbia gene (SEQ ID NO: 12).

[0720] In some embodiments, the at least one CBLB-targeting gRNA molecule binds to a target DNA sequence that is at least 95%, 96%, 97%, 98%, or 99% identical to a DNA sequence defined by a set of genomic coordinates shown in Table 17 or Table 18 and the at least one NFKBIA-targeting gRNA molecule binds to a target DNA sequence that is at least 95%, 96%, 97%, 98%, or 99% identical to a DNA sequence defined by a set of genomic coordinates shown in Table 21 or Table 22. In some embodiments, the at least one CBLB-targeting gRNA molecule binds to a target DNA sequence that is 100% identical to a DNA sequence encoded by a DNA sequence defined by a set of genomic coordinates shown in Table 17 or Table 18 and the at least one NFKBIA-targeting gRNA molecule binds to a target DNA sequence that is 100% identical to a DNA sequence encoded by a DNA sequence defined by a set of genomic coordinates shown in Table 21 or Table 22.

[0721] In some embodiments, the at least one CBLB-targeting gRNA molecule binds to a target DNA sequence that is at least 95%, 96%, 97%, 98%, or 99% identical to one of SEQ ID NOs: 798-823 or 798-808 and the at least one NFKBIA-targeting gRNA molecule binds to a target DNA sequence that is at least 95%, 96%, 97%, 98%, or 99% identical to one of SEQ ID NOs: 845-875 or 845-856. In some embodiments, the at least one CBLB-targeting gRNA molecule binds to a target DNA sequence that is 100% identical to one of SEQ ID NOs: 798-823 or 798-808 and the at least one NFKBIA-targeting gRNA molecule binds to a target DNA sequence that is 100% identical to one of SEQ ID NOs: 845-875 or 845-856.

[0722] In some embodiments, the at least one CBLB-targeting gRNA molecule is encoded by a DNA sequence that is at least 95%, 96%, 97%, 98%, or 99% identical to one of SEQ ID NOs: 798-823 or 798-808 and the at least one NFKBIA-targeting gRNA molecule is encoded by a DNA sequence that is at least 95%, 96%, 97%, 98%, or 99% identical to one of SEQ ID NOs: 845-875 or 845-856. In some embodiments, the at least one CBLB-targeting gRNA molecule is encoded by a DNA sequence that is 100% identical to one of SEQ ID NOs: 798-823 or 798-808 and the at least one NFKBIA-targeting gRNA molecule is encoded by a DNA sequence that is 100% identical to one of SEQ ID NOs: 845-875 or 845-856.

[0723] In some embodiments, the gene-regulating system comprises at least two gRNA molecules, wherein at least one gRNA molecule is a RC3H1-targeting gRNA molecule and at least one gRNA molecule is a NFKBIA-targeting gRNA molecule. In some embodiments, the at least one RC3H1-targeting gRNA molecule binds to a target DNA sequence that is at least 95%, 96%, 97%, 98%, or 99% identical to a DNA sequence in the RC3H1 gene (SEQ ID NO: 9) or the Rc3h1 gene (SEQ ID NO: 10) and the at least one NFKBIA-targeting gRNA molecule binds to a target DNA sequence that is at least 95%, 96%, 97%, 98%, or 99% identical to a DNA sequence in the NFKBIA gene (SEQ ID NO: 11) or the Nfkbia gene (SEQ ID NO: 12). In some embodiments, the at least one RC3H1-targeting gRNA molecule binds to a target DNA sequence that is 100% identical to a DNA sequence in the RC3H1 gene (SEQ ID NO: 9) or the Rc3h1 gene (SEQ ID NO: 10) and the at least one NFKBIA-targeting gRNA molecule binds to a target DNA sequence that is 100% identical to a DNA sequence in the NFKBIA gene (SEQ ID NO: 11) or the Nfkbia gene (SEQ ID NO: 12).

[0724] In some embodiments, the at least one RC3H1-targeting gRNA molecule binds to a target DNA sequence that is at least 95%, 96%, 97%, 98%, or 99% identical to a DNA sequence defined by a set of genomic coordinates shown in Table 19 or Table 20 and the at least one NFKBIA-targeting gRNA molecule binds to a target DNA sequence that is at least 95%, 96%, 97%, 98%, or 99% identical to a DNA sequence defined by a set of genomic coordinates shown in Table 21 or Table 22. In some embodiments, the at least one RC3H1-targeting gRNA molecule binds to a target DNA sequence that is 100% identical to a DNA sequence encoded by a DNA sequence defined by a set of genomic coordinates shown in Table 19 or Table 20 and the at least one NFKBIA-targeting gRNA molecule binds to a target DNA sequence that is 100% identical to a DNA sequence encoded by a DNA sequence defined by a set of genomic coordinates shown in Table 21 or Table 22.

[0725] In some embodiments, the at least one RC3H1-targeting gRNA molecule binds to a target DNA sequence that is at least 95%, 96%, 97%, 98%, or 99% identical to one of SEQ ID NOs: 824-844 or 824-836 and the at least one NFKBIA-targeting gRNA molecule binds to a target DNA sequence that is at least 95%, 96%, 97%, 98%, or 99% identical to one of SEQ ID NOs: 845-875 or 845-856. In some embodiments, the at least one RC3H1-targeting gRNA molecule binds to a target DNA sequence that is 100% identical to one of SEQ ID NOs: 824-844 or 824-836 and the at least one NFKBIA-targeting gRNA molecule binds to a target DNA sequence that is 100% identical to one of SEQ ID NOs: 845-875 or 845-856.

[0726] In some embodiments, the at least one RC3H1-targeting gRNA molecule is encoded by a DNA sequence that is at least 95%, 96%, 97%, 98%, or 99% identical to one of SEQ ID NOs: 824-844 or 824-836 and the at least one NFKBIA-targeting gRNA molecule is encoded by a DNA sequence that is at least 95%, 96%, 97%, 98%, or 99% identical to one of SEQ ID NOs: 845-875 or 845-856. In some embodiments, the at least one RC3H1-targeting gRNA molecule is encoded by a DNA sequence that is 100% identical to one of SEQ ID NOs: 824-844 or 824-836 and the at least one NFKBIA-targeting gRNA molecule is encoded by a DNA sequence that is 100% identical to one of SEQ ID NOs: 845-875 or 845-856.

[0727] In some embodiments, the nucleic acid-binding segments of the gRNA sequences described herein are designed to minimize off-target binding using algorithms known in the art (e.g., Cas-OFF finder) to identify target sequences that are unique to a particular target locus or target gene.

[0728] In some embodiments, the gRNAs described herein can comprise one or more modified nucleosides or nucleotides which introduce stability toward nucleases. In such embodiments, these modified gRNAs may elicit a reduced innate immune as compared to a non-modified gRNA. The term “innate immune response” includes a cellular response to exogenous nucleic acids, including single stranded nucleic acids, generally of viral or bacterial origin, which involves the induction of cytokine expression and release, particularly the interferons, and cell death.

[0729] In some embodiments, the gRNAs described herein are modified at or near the 5′ end (e.g., within 1-10, 1-5, or 1-2 nucleotides of their 5′ end). In some embodiments, the 5′ end of a gRNA is modified by the inclusion of a eukaryotic mRNA cap structure or cap analog (e.g., a G(5′)ppp(5′)G cap analog, a m7G(5′)ppp(5′)G cap analog, or a 3′-0-Me-m7G(5′)ppp(5′)G anti reverse cap analog (ARCA)). In some embodiments, an in vitro transcribed gRNA is modified by treatment with a phosphatase (e.g., calf intestinal alkaline phosphatase) to remove the 5′ triphosphate group. In some embodiments, a gRNA comprises a modification at or near its 3′ end (e.g., within 1-10, 1-5, or 1-2 nucleotides of its 3′ end). For example, in some embodiments, the 3′ end of a gRNA is modified by the addition of one or more (e.g., 25-200) adenine (A) residues.

[0730] In some embodiments, modified nucleosides and modified nucleotides can be present in a gRNA, but also may be present in other gene-regulating systems, e.g., mRNA, RNAi, or siRNA-based systems. In some embodiments, modified nucleosides and nucleotides can include one or more of:

[0731] (a) alteration, e.g., replacement, of one or both of the non-linking phosphate oxygens and/or of one or more of the linking phosphate oxygens in the phosphodiester backbone linkage;

[0732] (b) alteration, e.g., replacement, of a constituent of the ribose sugar, e.g., of the 2′ hydroxyl on the ribose sugar;

[0733] (c) wholesale replacement of the phosphate moiety with “dephospho” linkers;

[0734] (d) modification or replacement of a naturally occurring nucleobase;

[0735] (e) replacement or modification of the ribose-phosphate backbone;

[0736] (f) modification of the 3′ end or 5′ end of the oligonucleotide, e.g., removal, modification or replacement of a terminal phosphate group or conjugation of a moiety; and

[0737] (g) modification of the sugar.

[0738] In some embodiments, the modifications listed above can be combined to provide modified nucleosides and nucleotides that can have two, three, four, or more modifications. For example, in some embodiments, a modified nucleoside or nucleotide can have a modified sugar and a modified nucleobase. In some embodiments, every base of a gRNA is modified. In some embodiments, each of the phosphate groups of a gRNA molecule are replaced with phosphorothioate groups.

[0739] In some embodiments, a software tool can be used to optimize the choice of gRNA within a user's target sequence, e.g., to minimize total off-target activity across the genome. Off target activity may be other than cleavage. For example, for each possible gRNA choice using S. pyogenes Cas9, software tools can identify all potential off-target sequences (preceding either NAG or NGG PAMs) across the genome that contain up to a certain number (e.g., 1, 2, 3, 4, 5, 6, 7, 8, 9, or 10) of mismatched base-pairs. The cleavage efficiency at each off-target sequence can be predicted, e.g., using an experimentally-derived weighting scheme. Each possible gRNA can then be ranked according to its total predicted off-target cleavage; the top-ranked gRNAs represent those that are likely to have the greatest on-target and the least off-target cleavage. Other functions, e.g., automated reagent design for gRNA vector construction, primer design for the on-target Surveyor assay, and primer design for high-throughput detection and quantification of off-target cleavage via next-generation sequencing, can also be included in the tool.

### Methods of Producing Modified TILs

[0740] In some embodiments, the present disclosure provides improved methods for producing modified TILs. In some embodiments, the methods comprise introducing a gene-regulating system into a population of TILs wherein the gene-regulating system is capable of reducing expression and/or function of one, two or more endogenous target genes selected from ANKRD11, BCL2L11, BCL3, BCOR, CALM2, CBLB, CHIC2, CTLA4, DHODH, E2F8, EGR2, FLI1, FOXP3, GATA3, GNAS, HAVCR2, IKZF1, IKZF2, IKZF3, LAG3, MAP4K, NFKBIA, NR4A3, NRP1, PBRM1, PCBP1, PDCD1, PELI1, PIK3CD, PPP2R2D, PTPN1, PTPN2, PTPN22, PTPN6, RBM39, RC3H1, SEMA7A, SERPINA3, SETD5, SH2B3, SH2D1A, SMAD2, SOCS1, TANK, TGFBR1, TGFBR2, TIGIT, TNFAIP3, TNIP1, TRAF6, UMPS, WDR6 and ZC3H12A. (See International Publication Nos. WO 2019/178422, WO 2019/178420 and WO 2019/178421, incorporated by reference herein in their entireties.) In some embodiments, the one, two or more endogenous target genes selected from SOCS1, PTPN2, ZC3H12A, CBLB, RC3H1 and NFKBIA.

[0741] The components of the gene-regulating systems described herein, e.g., a nucleic acid-, protein-, or nucleic acid/protein-based system can be introduced into target cells in a variety of forms using a variety of delivery methods and formulations. In some embodiments, a polynucleotide encoding one or more components of the system is delivered by a recombinant vector (e.g., a viral vector or plasmid). In some embodiments, where the system comprises more than a single component, a vector may comprise a plurality of polynucleotides, each encoding a component of the system. In some embodiments, where the system comprises more than a single component, a plurality of vectors may be used, wherein each vector comprises a polynucleotide encoding a particular component of the system. In some embodiments, a vector may also comprise a sequence encoding a signal peptide (e.g., for nuclear localization, nucleolar localization, mitochondrial localization), fused to the polynucleotide encoding the one or more components of the system. For example, a vector may comprise a nuclear localization sequence (e.g., from SV40) fused to the polynucleotide encoding the one or more components of the system. In some embodiments, the introduction of the gene-regulating system to the cell occurs in vitro. In some embodiments, the introduction of the gene-regulating system to the cell occurs in vivo. In some embodiments, the introduction of the gene-regulating system to the cell occurs ex vivo.

[0742] In some embodiments, the recombinant vector comprising a polynucleotide encoding one or more components of a gene-regulating system described herein is a viral vector. Suitable viral vectors include, but are not limited to, viral vectors based on vaccinia virus; poliovirus; adenovirus (see, e.g., Li et al., Invest Opthalmol Vis Sci 35:2543 2549, 1994; Borras et al., Gene Ther 6:515 524, 1999; Li and Davidson, PNAS 92:7700 7704, 1995; Sakamoto et al., H Gene Ther 5:1088 1097, 1999; WO 94/12649, WO 93/03769; WO 93/19191; WO 94/28938; WO 95/11984 and WO 95/00655); adeno-associated virus (see, e.g., U.S. Pat. No. 7,078,387; Ali et al., Hum Gene Ther 9:81 86, 1998, Flannery et al, PNAS 94:6916 6921, 1997; Bennett et al., Invest Opthalmol Vis Sci 38:2857 2863, 1997; Jomary et al., Gene Ther 4:683 690, 1997, Rolling et al., Hum Gene Ther 10:641 648, 1999; Ali et al., Hum Mol Genet 5:591 594, 1996; Srivastava in WO 93/09239, Samulski et al., J. Vir. (1989) 63:3822-3828; Mendelson et al, Virol. (1988) 166:154-165; and Flotte et al., PNAS (1993) 90:10613-10617); SV40; herpes simplex virus; human immunodeficiency virus (see, e.g., Miyoshi et al., PNAS 94:10319 23, 1997; Takahashi et al., J Virol 73:7812 7816, 1999); a retroviral vector (e.g., Murine Leukemia Virus, spleen necrosis virus, and vectors derived from retroviruses such as Rous Sarcoma Virus, Harvey Sarcoma Virus, avian leukosis virus, a lentivirus, human immunodeficiency virus, myeloproliferative sarcoma virus, and mammary tumor virus); and the like.

[0743] In some embodiments, the recombinant vector comprising a polynucleotide encoding one or more components of a gene-regulating system described herein is a plasmid. Numerous suitable plasmid expression vectors are known to those of skill in the art, and many are commercially available. The following vectors are provided by way of example; for eukaryotic host cells: pXT1, pSG5 (Stratagene), pSVK3, pBPV, pMSG, and pSVLSV40 (Pharmacia). However, any other plasmid vector may be used so long as it is compatible with the host cell. Depending on the cell type and gene-regulating system utilized, any of a number of suitable transcription and translation control elements, including constitutive and inducible promoters, transcription enhancer elements, transcription terminators, etc. may be used in the expression vector (see e.g., Bitter et al. (1987) Methods in Enzymology, 153:516-544).

[0744] In some embodiments, a polynucleotide sequence encoding one or more components of a gene-regulating system described herein is operably linked to a control element, e.g., a transcriptional control element, such as a promoter. The transcriptional control element may be functional in either a eukaryotic cell (e.g., a mammalian cell) or a prokaryotic cell (e.g., bacterial or archaeal cell). In some embodiments, a polynucleotide sequence encoding one or more components of a gene-regulating system described herein is operably linked to multiple control elements that allow expression of the polynucleotide in both prokaryotic and eukaryotic cells. Depending on the cell type and gene-regulating system utilized, any of a number of suitable transcription and translation control elements, including constitutive and inducible promoters, transcription enhancer elements, transcription terminators, etc. may be used in the expression vector (see e.g., Bitter et al. (1987) Methods in Enzymology, 153:516-544).

[0745] Non-limiting examples of suitable eukaryotic promoters (promoters functional in a eukaryotic cell) include those from cytomegalovirus (CMV) immediate early, herpes simplex virus (HSV) thymidine kinase, early and late SV40, long terminal repeats (LTRs) from retrovirus, and mouse metallothionein-1. Selection of the appropriate vector and promoter is well within the level of ordinary skill in the art. The expression vector may also contain a ribosome binding site for translation initiation and a transcription terminator. The expression vector may also include appropriate sequences for amplifying expression. The expression vector may also include nucleotide sequences encoding protein tags (e.g., 6×His tag, hemagglutinin tag, green fluorescent protein, etc.) that are fused to the site-directed modifying polypeptide, thus resulting in a chimeric polypeptide.

[0746] In some embodiments, a polynucleotide sequence encoding one or more components of a gene-regulating system described herein is operably linked to an inducible promoter. In some embodiments, a polynucleotide sequence encoding one or more components of a gene-regulating system described herein is operably linked to a constitutive promoter.

[0747] Methods of introducing polynucleotides and recombinant vectors into a host cell are known in the art, and any known method can be used to introduce components of a gene-regulating system into a cell. Suitable methods include e.g., viral or bacteriophage infection, transfection, conjugation, protoplast fusion, lipofection, electroporation, calcium phosphate precipitation, polyethyleneimine (PEI)-mediated transfection, DEAE-dextran mediated transfection, liposome-mediated transfection, particle gun technology, calcium phosphate precipitation, direct micro injection, nanoparticle-mediated nucleic acid delivery (see, e.g., Panyam et al., Adv Drug Deliv Rev. 2012 Sep. 13. pii: 50169-409X(12)00283-9), microfluidics delivery methods (See e.g., International PCT Publication No. WO 2013/059343), and the like. In some embodiments, delivery via electroporation comprises mixing the cells with the components of a gene-regulating system in a cartridge, chamber, or cuvette and applying one or more electrical impulses of defined duration and amplitude. In some embodiments, cells are mixed with components of a gene-regulating system in a vessel connected to a device (e.g., a pump) which feeds the mixture into a cartridge, chamber, or cuvette wherein one or more electrical impulses of defined duration and amplitude are applied, after which the cells are delivered to a second vessel.

[0748] In some embodiments, electroporation is used to introduce components of a gene-regulating system into a cell. In some embodiments where a pre-REP and REP protocol is used, electroporation is used to introduce components of a gene-regulating system into a cell after the pre-REP stage but before the REP stage.

[0749] In some embodiments, one or more components of a gene-regulating system, or polynucleotide sequence encoding one or more components of a gene-regulating system described herein are introduced to a cell in a non-viral delivery vehicle, such as a transposon, a nanoparticle (e.g., a lipid nanoparticle), a liposome, an exosome, an attenuated bacterium, or a virus-like particle. In some embodiments, the vehicle is an attenuated bacterium (e.g., naturally or artificially engineered to be invasive but attenuated to prevent pathogenesis including Listeria monocytogenes, certain Salmonella strains, Bifidobacterium longum, and modified Escherichia coli), bacteria having nutritional and tissue-specific tropism to target specific cells, and bacteria having modified surface proteins to alter target cell specificity. In some embodiments, the vehicle is a genetically modified bacteriophage (e.g., engineered phages having large packaging capacity, less immunogenicity, containing mammalian plasmid maintenance sequences and having incorporated targeting ligands). In some embodiments, the vehicle is a mammalian virus-like particle. For example, modified viral particles can be generated (e.g., by purification of the “empty” particles followed by ex vivo assembly of the virus with the desired cargo). The vehicle can also be engineered to incorporate targeting ligands to alter target tissue specificity. In some embodiments, the vehicle is a biological liposome. For example, the biological liposome is a phospholipid-based particle derived from human cells (e.g., erythrocyte ghosts, which are red blood cells broken down into spherical structures derived from the subject and wherein tissue targeting can be achieved by attachment of various tissue or cell-specific ligands), secretory exosomes, or subject derived membrane-bound nanovesicles (30-100 nm) of endocytic origin (e.g., can be produced from various cell types and can therefore be taken up by cells without the need for targeting ligands).

[0750] In some embodiments, the methods of modified TILs described herein comprise obtaining a population of TILs from a sample. In some embodiments, a sample comprises a tissue sample, a fluid sample, a cell sample, a protein sample, or a DNA or RNA sample. In some embodiments, a tissue sample may be derived from any tissue type including, but not limited to skin, hair (including roots), bone marrow, bone, muscle, salivary gland, esophagus, stomach, small intestine (e.g., tissue from the duodenum, jejunum, or ileum), large intestine, liver, gallbladder, pancreas, lung, kidney, bladder, uterus, ovary, vagina, placenta, testes, thyroid, adrenal gland, cardiac tissue, thymus, spleen, lymph node, spinal cord, brain, eye, ear, tongue, cartilage, white adipose tissue, or brown adipose tissue. In some embodiments, a tissue sample may be derived from a cancerous, pre-cancerous, or non-cancerous tumor. In some embodiments, a fluid sample comprises buccal swabs, blood, plasma, oral mucous, vaginal mucous, peripheral blood, cord blood, saliva, semen, urine, ascites fluid, pleural fluid, spinal fluid, pulmonary lavage, tears, sweat, semen, seminal fluid, seminal plasma, prostatic fluid, pre-ejaculatory fluid (Cowper's fluid), excreta, cerebrospinal fluid, lymph, cell culture media comprising one or more populations of cells, buffered solutions comprising one or more populations of cells, and the like.

[0751] In some embodiments, the sample is processed to enrich or isolate a particular cell type, such as an immune effector cell, from the remainder of the sample. In certain embodiments, the sample is a peripheral blood sample which is then subject to leukopheresis to separate the red blood cells and platelets and to isolate lymphocytes. In some embodiments, the sample is a leukopak from which immune effector cells can be isolated or enriched. In some embodiments, the sample is a tumor sample that is further processed to isolate lymphocytes present in the tumor (i.e., to isolate tumor infiltrating lymphocytes).

[0752] In some embodiments, the isolated immune effector cells are expanded in culture to produce an expanded population of immune effector cells. One or more activating or growth factors may be added to the culture system during the expansion process. For example, in some embodiments, one or more cytokines (such as IL-2, IL-15, and/or IL-7) can be added to the culture system to enhance or promote cell proliferation and expansion. In some embodiments, one or more activating antibodies, such as an anti-CD3 antibody, may be added to the culture system to enhance or promote cell proliferation and expansion. In some embodiments, the immune effector cells may be co-cultured with feeder cells during the expansion process. In some embodiments, the methods provided herein comprise one or more expansion phases. For example, in some embodiments, the immune effector cells can be expanded after isolation from a sample, allowed to rest, and then expanded again. In some embodiments, the immune effector cells can be expanded in one set of expansion conditions followed by a second round of expansion in a second, different, set of expansion conditions. Previous methods for ex vivo expansion of immune cells are known in the art, for example, as described in US Patent Application Publication Nos. 20180282694 and 20170152478 and U.S. Pat. Nos. 8,383,099 and 8,034,334.

[0753] At any point during the culture and expansion process, the gene-regulating systems described herein can be introduced to the immune effector cells to produce a population of modified TILs. In some embodiments, the gene-regulating system is introduced to the population of immune effector cells immediately after enrichment from a sample. In some embodiments, the gene-regulating system is introduced to the population of immune effector cells before, during, or after the one or more expansion process. In some embodiments, the gene-regulating system is introduced to the population of immune effector cells immediately after enrichment from a sample or harvest from a subject, and prior to any expansion rounds. In some embodiments, the gene-regulating system is introduced to the population of immune effector cells after a first round of expansion and prior to a second round of expansion. In some embodiments, the gene-regulating system is introduced to the population of immune effector cells after a first and a second round of expansion.

[0754] In some embodiments, the modified TILs produced by the methods described herein may be used immediately. Alternatively, the cells may be frozen at liquid nitrogen temperatures and stored for long periods of time, being thawed and capable of being reused. In such cases, the cells will usually be frozen in 10% dimethylsulfoxide (DMSO), 50% serum, 40% buffered medium, or some other such solution as is commonly used in the art to preserve cells at such freezing temperatures and thawed in a manner as commonly known in the art for thawing frozen cultured cells.

[0755] In some embodiments, the modified TILs may be cultured in vitro under various culture conditions. The cells may be expanded in culture, i.e., grown under conditions that promote their proliferation. Culture medium may be liquid or semi-solid, e.g., containing agar, methylcellulose, etc. The cell population may be suspended in an appropriate nutrient medium, such as Iscove's modified DMEM or RPMI 1640, normally supplemented with fetal calf serum (about 5-10%), L-glutamine, a thiol, particularly 2-mercaptoethanol, and antibiotics, e.g., penicillin and streptomycin. The culture may contain growth factors to which the regulatory T cells are responsive. Growth factors, as defined herein, are molecules capable of promoting survival, growth and/or differentiation of cells, either in culture or in the intact tissue, through specific effects on a transmembrane receptor. Growth factors include polypeptides and non-polypeptide factors.

### Producing Modified TILs Using CRISPR/Cas Systems

[0756] In some embodiments, a method of producing a modified TIL involves contacting a target DNA sequence with a complex comprising a gRNA and a Cas polypeptide. As discussed above, a gRNA and Cas polypeptide form a complex, wherein the DNA-binding domain of the gRNA targets the complex to a target DNA sequence and wherein the Cas protein (or heterologous protein fused to an enzymatically inactive Cas protein) modifies target DNA sequence. In some embodiments, this complex is formed intracellularly after introduction of the gRNA and Cas protein (or polynucleotides encoding the gRNA and Cas proteins) to a cell. In some embodiments, the nucleic acid encoding the Cas protein is a DNA nucleic acid and is introduced to the cell by transduction. In some embodiments, the Cas and gRNA components of a CRISPR/Cas gene editing system are encoded by a single polynucleotide molecule. In some embodiments, the polynucleotide encoding the Cas protein and gRNA component are comprised in a viral vector and introduced to the cell by viral transduction. In some embodiments, the Cas9 and gRNA components of a CRISPR/Cas gene editing system are encoded by different polynucleotide molecules. In some embodiments, the polynucleotide encoding the Cas protein is comprised in a first viral vector and the polynucleotide encoding the gRNA is comprised in a second viral vector. In some aspects of this embodiment, the first viral vector is introduced to a cell prior to the second viral vector. In some aspects of this embodiment, the second viral vector is introduced to a cell prior to the first viral vector. In such embodiments, integration of the vectors results in sustained expression of the Cas9 and gRNA components. However, sustained expression of Cas9 may lead to increased off-target mutations and cutting in some cell types. Therefore, in some embodiments, an mRNA nucleic acid sequence encoding the Cas protein may be introduced to the population of cells by transfection. In such embodiments, the expression of Cas9 will decrease over time, and may reduce the number of off target mutations or cutting sites.

[0757] In some embodiments, this complex is formed in a cell-free system by mixing the gRNA molecules and Cas proteins together and incubating for a period of time sufficient to allow complex formation. This pre-formed complex, comprising the gRNA and Cas protein and referred to herein as a CRISPR-ribonucleoprotein (CRISPR-RNP) can then be introduced to a cell in order to modify a target DNA sequence. The complexing can also occur in the target cell, with the Cas protein and gRNA being introduced separately.

Producing Modified TILs Using shRNA Systems

[0758] In some embodiments, a method of producing a modified TIL by introducing into the cell one or more DNA polynucleotides encoding one or more shRNA molecules with sequence complementary to the mRNA transcript of a target gene is disclosed. The TIL can be modified to produce the shRNA by introducing specific DNA sequences into the cell nucleus via a small gene cassette. Both retroviruses and lentiviruses can be used to introduce shRNA-encoding DNAs into TILs. The introduced DNA can either become part of the cell's own DNA or persist in the nucleus and instructs the cell machinery to produce shRNAs. shRNAs may be processed by Dicer or AGO2-mediated slicer activity inside the cell to induce RNAi mediated gene knockdown.

Producing Modified TILs Using siRNA Systems

[0759] In some embodiments, a method of producing a modified TIL by introducing into the TIL one or more DNA polynucleotides encoding one or more siRNA molecules with sequence complementary to the mRNA transcript of a target gene is disclosed. The TIL can be modified to produce the siRNA by introducing specific DNA sequences into the cell nucleus via a small gene cassette. Retrovirus, adeno-associated virus, adenovirus, and lentivirus can be used to introduce siRNA-encoding DNAs into TILs. The introduced DNA can either become part of the cell's own DNA or persist in the nucleus and instructs the cell machinery to produce siRNAs. The siRNA can interfere with gene expression.

Methods of Reducing Exhaustion, while Maintaining Cytotoxicity, in Cultured TILs

[0760] In one aspect, the present disclosure provides methods of reducing exhaustion and maintaining cytotoxicity in a population of cultured TILs, or methods of inducing TIL persistence and expansion while maintaining cytotoxicity, the methods comprising culturing the population of TILs in a culture medium comprising the T cell-stimulating cytokine, IL-15, wherein the population of TILS are modified at the SOCS1 gene. In another aspect, the present disclosure provides methods of reducing exhaustion and maintaining cytotoxicity in a population of cultured TILs, or methods of inducing TIL persistence and expansion while maintaining cytotoxicity, the methods comprising culturing the population of TILs in a culture medium comprising the T cell-stimulating cytokine, IL-15, wherein the population of TILS are modified at the SOCS1 gene and the ZC3H12A gene. In some embodiments, the modification of the SOCS1 gene and/or the ZC3H12A gene results in the reduction or inhibition of expression of the gene and/or function of a protein encoded by the gene. In some embodiments, the population of TILs comprise a reduction in expression of one or more exhaustion related genes selected from PTGER2, FASLG, TNFRSF9, IRF4, CTLA4, EOMES, PDPN, LAG3, TNFSF9, CD86, TIGIT, HAVCR2, CASP3, PROCR, MDFIC, CCL3, CD160, BATF, TOX, CD244, B3GAT1, KLRG1, LILRB4 and PDCD1 relative to TILS modified at the SOCS1 gene and cultured in culture medium without IL-15. In some embodiments, the expression levels of one or more cytotoxicity related genes selected from ITGB2, CSF2, TNF, FASLG, TNFRSF10B, LCK, IFNG, IFNB1, BID, GZMB, PRF1, KLRK1, ZAP70, FYN, GZMA, VAV3, GZMH, GZMM, KIR3DL1, IFNGR2, VAV1, SOS2, PTPN6, PTK2B, SH3BP2, LAT, KLRC2, IFNA1, CASP3, ICAMI, SH2D1A, ARAF, NFATC1, IFNAR1, NCR1, NCR3, IFNGR1, NCR2, TYROBP, FCGR3B, KLRD1, FAS, CD244, RAC2 and CD247 are increased relative to TILS un-modified at the SOCS1 gene and cultured in culture medium with IL-15.

[0761] In some embodiments, the cytotoxicity and/or exhaustion measures are based on a scoring system. In some embodiments, cytotoxicity is measured by a cytotoxicity score. In some embodiments, exhaustion is measured by an exhaustion score. As used herein, the terms “cytotoxicity score” and “exhaustion score” refer to the scoring algorithms described in Tomfohr J, Lu J, Kepler T B, Pathway level analysis of gene expression using singular value decomposition, BMC Bioinformatics. 2005; 6:225, incorporated by reference in its entirety. NanoString “nSolver” software can be utilized to apply the algorithm to data. The term “exhaustion marker” refers to a gene or set of genes that can be utilized to determine the exhaustion score. The term “cytotoxicity marker” refers to a gene or set of genes that can be utilized to determine the cytotoxicity score. In some embodiments, the exhaustion or cytotoxicity markers are used according to the methods provided below. Exhaustion markers include, for example, PTGER2, FASLG, TNFRSF9, IRF4, CTLA4, EOMES, PDPN, LAG3, TNFSF9, CD86, TIGIT, HAVCR2, CASP3, PROCR, MDFIC, CCL3, CD160, BATF, TOX, CD244, B3GAT1, KLRG1, LILRB4 and PDCD1. Cytotoxicity markers include, for example, ITGB2, CSF2, TNF, FASLG, TNFRSF10B, LCK, IFNG, IFNB1, BID, GZMB, PRF1, KLRK1, ZAP70, FYN, GZMA, VAV3, GZMH, GZMM, KIR3DL1, IFNGR2, VAV1, SOS2, PTPN6, PTK2B, SH3BP2, LAT, KLRC2, IFNA1, CASP3, ICAMI, SH2DA, ARAF, NFATC1, IFNAR1, NCR1, NCR3, IFNGR1, NCR2, TYROBP, FCGR3B, KLRD1, FAS, CD244, RAC2 and CD247.

[0762] To calculate the relevant exhaustion and cytotoxicity scores, the analysis starts by quantifying, in each sample, the level of activity of each pathway. The activity level of a pathway in a given sample can be defined as the level of expression of a certain metagene in that sample.

[0763] In some embodiments, calculation begins by standardizing the gene expression levels to have zero mean and unit variance over samples. For each pathway, a matrix Y (rows=genes, columns=samples) is formed containing the standardized expression levels from all samples but for the genes in that pathway only. The singular value decomposition of Y is expressed as

Y=WDC. (1)

Here the columns of the matrix W are the orthonormal (W^{T}W=I, the identity matrix) eigenvectors or metagenes of Y, D is a diagonal matrix containing the associated eigenvalues, and each column of C is a vector of coefficients for one of the samples indicating the level of each metagene in the sample. The rows of C are also orthonormal (CC^{T}=I). Assume the eigenvalues are ordered from highest to lowest going down the diagonal of D. The first metagene w—that associated with the largest eigenvalue—is then the first column of W. The eigenvalue can be designated as λ and the associated coefficients (first row of C) as cⱼ. The activity level of a pathway in a given sample j is taken as the coefficient cⱼ for the first metagene. It follows also from the orthonormality of the columns of W and rows of C that

$${c}_{j} = \text{?} {\sum }_{i} {w}_{i} {y}_{ij} . \qquad ( 2 )$$

$$\text{?} \text{indicates text missing or illegible when filed}$$

[0764] That is, the activity level cⱼ can also be regarded (up to a non-essential scale factor) as a weighted sum of the standardized expression levels of the individual genes, the weights being given by the first metagene w. One motivation for using the first metagene in SVD is that the resulting combination of activity levels and weights specifies an optimal approximation to the matrix Y (i.e., accounts for the main component of the variation in the data). Specifically, assume the following statistical model for the expression levels

yᵢⱼ=αᵢχⱼ+εᵢⱼ (3)

where the vector χ is constrained to have unit norm and the εᵢⱼ are independent Gaussian random variables. The estimates for α and χ that minimize the sum of the squared errors are just the first metagene scaled by its eigenvalue, λw, and the associated vector of activity levels c, respectively.

[0765] A useful fact about the first eigenvalue is that its square is a measure of the amount of variation accounted for by the first metagene. Specifically, with n_{g}=number of genes and nₛ=number of samples, the total amount of variation in the data is Σᵢⱼγᵢⱼ²=n_{g}(nₛ−1) (recall, the expression levels are standardized so that

$$\frac{1}{n \text{?} - 1} \sum \text{?} = 1 )$$

$$\text{?} \text{indicates text missing or illegible when filed}$$

and the variation remaining after subtracting off the profile described by the first metagene is Σᵢⱼ(yᵢⱼ−λwᵢcⱼ)²=n_{g}(nₛ−1)−λ².

### Adoptive Cell Transfer

[0766] Adoptive cell transfer (ACT) is a very effective form of immunotherapy and involves the transfer of immune cells with antitumor activity into cancer patients. In some cases, ACT is a treatment approach that involves the identification, in vitro, of lymphocytes with antitumor activity, the in vitro expansion of these cells to large numbers and their infusion into the cancer-bearing host. Lymphocytes used for adoptive transfer can be derived from the stroma of resected tumors (tumor infiltrating lymphocytes or TILs). TILs for ACT can be prepared as described herein. ACT in which the lymphocytes originate from the cancer-bearing host to be infused is termed autologous ACT. ACT can also involve use of lymphocytes from donors other than the subject suffering from cancer. In some embodiments, the donor has the same type of cancer as the subject to be infused with allogeneic lymphocytes. U.S. Publication No. 2011/0052530, incorporated by reference herein in its entirety, relates to a method for performing adoptive cell therapy to promote cancer regression, primarily for treatment of patients suffering from metastatic melanoma, which is incorporated by reference in its entirety for these methods. In some embodiments, TILs can be administered as described herein. In some embodiments, TILs can be administered in a single dose. Such administration may be by injection, e.g., intravenous injection. In some embodiments, TILs and/or cytotoxic lymphocytes may be administered in multiple doses.

[0767] Prior to transfer immune cells with antitumor activity into cancer patients, a lymphodepletion step on the patient may be utilized. The lymphodepletion eliminate partially or completely regulatory T cells and competing elements of the immune system. In some embodiments, lymphodepletion is utilized. In other embodiments, lymphodepletion is not utilized.

### Pharmaceutical Compositions, Dosages, and Dosing Regimens

[0768] In an embodiment, TILs expanded using the methods of the present disclosure are administered to a patient as a pharmaceutical composition. In an embodiment, the pharmaceutical composition is a suspension of TILs in a sterile buffer. In some embodiments, the TILs are administered as a single intra-arterial or intravenous infusion. Other suitable routes of administration include intraperitoneal, intrathecal, and intralymphatic administration. TILs expanded using PBMCs of the present disclosure may be administered by any suitable route as known in the art. In some embodiments, the T-cells are administered as a single intra-arterial or intravenous infusion, which preferably lasts approximately 30 to 60 minutes. Other suitable routes of administration include intraperitoneal, intrathecal, and intralymphatic administration.

[0769] Any suitable dose of TILs can be administered. In some embodiments, from about 1×10⁹ to about 2×10¹¹ of TILs are administered. In some embodiments, from about 2.3×10¹⁰ to about 13.7×10¹⁰ TILs are administered, with an average of around 7.8×10¹⁰ TILs, particularly if the cancer is melanoma. In an embodiment, about 1.2×10¹⁰ to about 4.3×10¹⁰ of TILs are administered. In some embodiments, about 3×10¹⁰ to about 12×10¹⁰ TILs are administered. In some embodiments, about 4×10¹⁰ to about 1×10¹⁰ TILs are administered. In some embodiments, about 5×10¹⁰ to about 8×10¹⁰ TILs are administered. In some embodiments, about 6×10¹⁰ to about 8×10¹⁰ TILs are administered. In some embodiments, about 7×10¹⁰ to about 8×10¹⁰ TILs are administered. In some embodiments, the therapeutically effective dosage is about 2.3×10¹⁰ to about 13.7×10¹⁰. In some embodiments, the therapeutically effective dosage is about 7.8×10¹⁰ TILs, particularly of the cancer is melanoma. In some embodiments, the therapeutically effective dosage is about 1.2×10¹⁰ to about 4.3×10¹⁰ of TILs. In some embodiments, the therapeutically effective dosage is about 3×10¹⁰ to about 12×10¹⁰ TILs. In some embodiments, the therapeutically effective dosage is about 4×10¹⁰ to about 1×10¹⁰ TILs. In some embodiments, the therapeutically effective dosage is about 5×10¹⁰ to about 8×10¹⁰ TILs. In some embodiments, the therapeutically effective dosage is about 6×10¹⁰ to about 8×10¹⁰ TILs. In some embodiments, the therapeutically effective dosage is about 7×10¹⁰ to about 8×10¹⁰ TILs.

[0770] In some embodiments, the number of the TILs provided in the pharmaceutical compositions of the invention is an effective dosage of TILs. In some embodiments, an effective dosage of TILs is about 1×10⁶, 2×10⁶, 3×10⁶, 4×10⁶, 5×10⁶, 6×10⁶, 7×10⁶, 8×10⁶, 9×10⁶, 1×10⁷, 2×10⁷, 3×10⁷, 4×10⁷, 5×10⁷, 6×10⁷, 7×10⁷, 8×10⁷, 9×10⁷, 1×10⁸, 2×10⁸, 3×10⁸, 4×10⁸, 5×10⁸, 6×10⁸, 7×10⁸, 8×10⁸, 9×10⁸, 1×10⁹, 2×10⁹, 3×10⁹, 4×10⁹, 5×10⁹, 6×10⁹, 7×10⁹, 8×10⁹, 9×10⁹, 1×10¹⁰, 2×10¹⁰, 3×10¹⁰, 4×10¹⁰, 5×10¹⁰, 6×10¹⁰, 7×10¹⁰, 8×10¹⁰, 9×10¹⁰, 1×10¹¹, 2×10¹¹, 3×10¹¹, and 4×10¹¹. In an embodiment, an effective dosage of TILs is in the range of 1×10⁶ to 5×10⁶, 5×10⁶ to 1×10⁷, 1×10⁷ to 5×10⁷, 5×10⁷ to 1×10⁸, 1×10⁸ to 5×10⁸, 5×10⁸ to 1×10⁹, 1×10⁹ to 5×10⁹, 5×10⁹ to 1×10¹⁰, 1×¹⁰1° to 5×10¹⁰, and 5×10¹⁰ to 4×10¹¹.

[0771] In some embodiments, the concentration of the TILs provided in the pharmaceutical compositions of the invention is less than, for example, 100%, 90%, 80%, 70%, 60%, 50%, 40%, 30%, 20%, 19%, 18%, 17%, 16%, 15%, 14%, 13%, 12%, 11%, 10%, 9%, 8%, 7%, 6%, 5%, 4%, 3%, 2%, 1%, 0.5%, 0.4%, 0.3%, 0.2%, 0.1%, 0.09%, 0.08%, 0.07%, 0.06%, 0.05%, 0.04%, 0.03%, 0.02%, 0.01%, 0.009%, 0.008%, 0.007%, 0.006%, 0.005%, 0.004%, 0.003%, 0.002%, 0.001%, 0.0009%, 0.0008%, 0.0007%, 0.0006%, 0.0005%, 0.0004%, 0.0003%, 0.0002% or 0.0001% w/w, w/v or v/v of the pharmaceutical composition.

[0772] In some embodiments, the concentration of the TILs provided in the pharmaceutical compositions of the invention is greater than 90%, 80%, 70%, 60%, 50%, 40%, 30%, 20%, 19.75%, 19.50%, 19.25% 19%, 18.75%, 18.50%, 18.25% 18%, 17.75%, 17.50%, 17.25% 17%, 16.75%, 16.50%, 16.25% 16%, 15.75%, 15.50%, 15.25% 15%, 14.75%, 14.50%, 14.25% 14%, 13.75%, 13.50%, 13.25% 13%, 12.75%, 12.50%, 12.25% 12%, 11.75%, 11.50%, 11.25% 11%, 10.75%, 10.50%, 10.25% 10%, 9.75%, 9.50%, 9.25% 9%, 8.75%, 8.50%, 8.25% 8%, 7.75%, 7.50%, 7.25% 7%, 6.75%, 6.50%, 6.25% 6%, 5.75%, 5.50%, 5.25% 5%, 4.75%, 4.50%, 4.25%, 4%, 3.75%, 3.50%, 3.25%, 3%, 2.75%, 2.50%, 2.25%, 2%, 1.75%, 1.50%, 125%, 1%, 0.5%, 0.4%, 0.3%, 0.2%, 0.1%, 0.09%, 0.08%, 0.07%, 0.06%, 0.05%, 0.04%, 0.03%, 0.02%, 0.01%, 0.009%, 0.008%, 0.007%, 0.006%, 0.005%, 0.004%, 0.003%, 0.002%, 0.001%, 0.0009%, 0.0008%, 0.0007%, 0.0006%, 0.0005%, 0.0004%, 0.0003%, 0.0002% or 0.0001% w/w, w/v, or v/v of the pharmaceutical composition.

[0773] In some embodiments, the concentration of the TILs provided in the pharmaceutical compositions of the invention is in the range from about 0.0001% to about 50%, about 0.001% to about 40%, about 0.01% to about 30%, about 0.02% to about 29%, about 0.03% to about 28%, about 0.04% to about 27%, about 0.05% to about 26%, about 0.06% to about 25%, about 0.07% to about 24%, about 0.08% to about 23%, about 0.09% to about 22%, about 0.1% to about 21%, about 0.2% to about 20%, about 0.3% to about 19%, about 0.4% to about 18%, about 0.5% to about 17%, about 0.6% to about 16%, about 0.7% to about 15%, about 0.8% to about 14%, about 0.9% to about 12% or about 1% to about 10% w/w, w/v or v/v of the pharmaceutical composition.

[0774] In some embodiments, the concentration of the TILs provided in the pharmaceutical compositions of the invention is in the range from about 0.001% to about 10%, about 0.01% to about 5%, about 0.02% to about 4.5%, about 0.03% to about 4%, about 0.04% to about 3.5%, about 0.05% to about 3%, about 0.06% to about 2.5%, about 0.07% to about 2%, about 0.08% to about 1.5%, about 0.09% to about 1%, about 0.1% to about 0.9% w/w, w/v or v/v of the pharmaceutical composition.

[0775] The TILs provided in the pharmaceutical compositions of the invention are effective over a wide dosage range. The exact dosage will depend upon the route of administration, the form in which the compound is administered, the gender and age of the subject to be treated, the body weight of the subject to be treated, and the preference and experience of the attending physician. The clinically-established dosages of the TILs may also be used if appropriate. The amounts of the pharmaceutical compositions administered using the methods herein, such as the dosages of TILs, will be dependent on the human or mammal being treated, the severity of the disorder or condition, the rate of administration, the disposition of the active pharmaceutical ingredients and the discretion of the prescribing physician.

[0776] In some embodiments, TILs may be administered in a single dose. Such administration may be by injection, e.g., intravenous injection. In some embodiments, TILs may be administered in multiple doses. Administration of TILs may continue as long as necessary.

[0777] An effective amount of the TILs may be administered in either single or multiple doses by any of the accepted modes of administration of agents having similar utilities, including intranasal and transdermal routes, by intra-arterial injection, intravenously, intraperitoneally, parenterally, intramuscularly, subcutaneously, topically, by transplantation, or by inhalation. In certain embodiments, TILs are administered intravenously.

### Cell Counts, Cell Viability, Flow Cytometry

[0778] In some embodiments, cell counts and/or viability are measured. The expression of markers such as but not limited CD3, CD4, CD8, and CD56, as well as any other disclosed or described herein, can be measured by flow cytometry with antibodies, for example but not limited to those commercially available from BD Bio-sciences (BD Biosciences, San Jose, Calif.) using a FACSCanto™ flow cytometer (BD Biosciences). The cells can be counted manually using a disposable c-chip hemocytometer (VWR, Batavia, Ill.) and viability can be assessed using any method known in the art, including but not limited to trypan blue staining.

[0779] In an embodiment, a method for expanding TILs may include using no more than 30,000 ml of cell medium. In some embodiments, a method for expanding TILs may include using from about 5,000 ml to about 25,000 ml of cell medium, about 5,000 ml to about 10,000 ml of cell medium, or about 5,800 ml to about 8,700 ml of cell medium. In an embodiment, expanding the number of TILs uses no more than one type of cell culture medium. Any suitable cell culture medium may be used, e.g., AIM-V cell medium (L-glutamine, 50 μM streptomycin sulfate, and M gentamicin sulfate) cell culture medium (Invitrogen, Carlsbad Calif.). The REP stage, described above, can require the use of a maximum of 30,000 ml of cell media. The pre-REP stage, described above, can require the use of only up to 100 ml of cell media.

[0780] In an embodiment, TILs are expanded in gas-permeable containers. Gas-permeable containers have been used to expand TILs using PBMCs using methods, compositions, and devices known in the art, including those described in U.S. Patent Application Publication No. 2005/0106717 A1, the disclosure of which is incorporated herein by reference in its entirety. In an embodiment, TILs are expanded in gas-permeable bags. In an embodiment, TILs are expanded using a cell expansion system that expands TILs in gas permeable bags, such as the Xuri Cell Expansion System W25 (GE Healthcare). In an embodiment, TILs are expanded using a cell expansion system that expands TILs in gas permeable bags, such as the WAVE Bioreactor System, also known as the Xuri Cell Expansion System W5 (GE Healthcare). In an embodiment, the cell expansion system includes a gas permeable cell bag with a volume selected from the group consisting of about 100 ml, about 200 ml, about 300 ml, about 400 ml, about 500 ml, about 600 ml, about 700 ml, about 800 ml, about 900 ml, about 1 L, about 2 L, about 3 L, about 4 L, about 5 L, about 6 L, about 7 L, about 8 L, about 9 L, and about 10 L. In an embodiment, TILs can be expanded in G-Rex flasks (commercially available from Wilson Wolf Manufacturing). Such embodiments allow for cell populations to expand from about 5×10⁵ cells/cm² to between 10×10⁶ and 30×10⁶ cells/cm². In an embodiment this expansion is conducted without adding fresh cell culture media to the cells (also referred to as feeding the cells). In an embodiment, this is without feeding so long as medium resides at a height of about 10 cm in the G-Rex flask. In an embodiment this is without feeding but with the addition of one or more cytokines. In an embodiment, the cytokine can be added as a bolus without any need to mix the cytokine with the medium. Such containers, devices, and methods are known in the art and have been used to expand TILs, and include those described in U.S. Patent Application Publication No. US 2014/0377739A1, International Publication No. WO 2014/210036 A1, U.S. Patent Application Publication No. us 2013/0115617 A1, International Publication No. WO 2013/188427 A1, U.S. Patent Application Publication No. US 2011/0136228 A1, U.S. Pat. No. 8,809,050 B2, International publication No. WO 2011/072088 A2, U.S. Patent Application Publication No. US 2016/0208216 A1, U.S. Patent Application Publication No. US 2012/0244133 A1, International Publication No. WO 2012/129201 A1, U.S. Patent Application Publication No. US 2013/0102075 A1, U.S. Pat. No. 8,956,860 B2, International Publication No. WO 2013/173835 A1, U.S. Patent Application Publication No. US 2015/0175966 A1. Such processes are also described in Jin et al., J. Immunotherapy, 2012, 35:283-292. All of these publications are incorporated by reference herein in their entireties.

[0781] All references, articles, publications, patents, patent publications, and patent applications cited herein are incorporated by reference in their entireties for all purposes. However, mention of any reference, article, publication, patent, patent publication, and patent application cited herein is not, and should not be taken as, an acknowledgment or any form of suggestion that they constitute valid prior art or form part of the common general knowledge in any country in the world.

### Additional Embodiments

[0782] Additional embodiments of the present disclosure are encompassed by the following numbered paragraphs 1-388:

1. A method of expanding a population of tumor infiltrating lymphocytes (TILs), the method comprising the steps of:

[0783] culturing a disaggregated tumor sample in a first medium comprising a T cell-stimulating cytokine to obtain a population of TILs; and

[0784] culturing the population of TILs in a second medium comprising: a T cell receptor (TCR) agonist, feeder cells and greater than 100 ng/ml IL-15, wherein the second medium does not comprise IL-2, thereby expanding the population of TILs.

2. The method of paragraph 1, wherein the final concentration of IL-15 in the second medium is less than or equal to 10,000 ng/ml, optionally less than or equal to 9000, 8000, 7000, 6000, 5000, 4000, 3000, 2000, or 1000 ng/ml.
3. The method of paragraph 1 or 2, wherein the T cell-stimulating cytokine is selected from the group consisting of IL-2, IL-7, IL-15, IL-21, and combinations thereof.
4. The method of paragraph 1 or 2, wherein the first medium does not comprise IL-2, IL-21, or both IL-2 and IL-21.
5. The method of paragraph 1 or 2, wherein the first medium does not comprise IL-2.
6. The method of paragraph 1 or 2, wherein the first medium does not comprise IL-21.
7. The method of any one of the preceding paragraphs, wherein the second medium does not comprise IL-21.
8. The method of any one of the preceding paragraphs, wherein the second medium further comprises IL-7.
9. The method of any one of the preceding paragraphs, wherein the final concentration of the T cell-stimulating cytokine in the first medium is from 10 U/ml to 7,000 U/ml.
10. The method of paragraph 8, wherein the final concentration of IL-7 in the second medium is from 10 U/ml to 7,000 U/ml.
11. The method of any one of the preceding paragraphs, wherein the TCR agonist is a CD3 agonist.
12. The method of any one of the preceding paragraphs, wherein the TCR agonist is an antibody.
13. The method of paragraph 12, wherein the antibody is a humanized antibody.
14. The method of any one of the preceding paragraphs, wherein the TCR agonist is OKT3 or UCHT1.
15. The method of any one of paragraphs 1-11, wherein the feeder cells express the TCR agonist.
16. The method of any one of the preceding paragraphs, wherein the feeder cells express an agonist of a T cell costimulatory molecule.
17. The method of paragraph 16, wherein the agonist of a T cell costimulatory molecule is a CD28 agonist.
18. The method of paragraph 16, wherein the agonist of a T cell costimulatory molecule is a CD137 agonist.
19. The method of paragraph 16, wherein the agonist of a T cell costimulatory molecule is a CD2 agonist.
20. The method of any one of paragraphs 15-19, wherein the TCR agonist and/or agonist of a T cell costimulatory molecule are expressed on the surface of the feeder cells.
21. The method of any one of the preceding paragraphs, wherein a 4-1BB ligand is expressed on the surface of the feeder cells.
22. The method of any one of the preceding paragraphs, wherein the feeder cells are peripheral blood mononuclear cells or antigen presenting cells.
23. The method of any one of the preceding paragraphs, wherein the feeder cells are genetically modified to express IL-15, IL-7, or both IL-15 and IL-7.
24. The method of any one of the preceding paragraphs, wherein the disaggregated tumor sample comprises tumor fragments that are 0.5 to 4 mm³ in size.
25. The method of any one of the preceding paragraphs, wherein the disaggregated tumor sample comprises digested tumor fragments.
26. The method of any of one of the preceding paragraphs, wherein the disaggregated tumor sample was previously exposed to a pre-REP step that produced less than 100,000 TILs.
27. The method of any of one of the preceding paragraphs, wherein the disaggregated tumor sample was previously exposed to a pre-REP step that expanded TILs present in the disaggregated tumor sample by less than 5-fold.
28. The method of any one of the preceding paragraphs, wherein members of the population of TILs are modified by a gene-regulating system.
29. The method of paragraph 28, wherein the members of the population of TILs are modified using RNA interference.
30. The method of paragraph 28, wherein the members of the population of TILs are modified using a transcription activator-like effector nuclease (TALEN).
31. The method of paragraph 28, wherein the members of the population of TILs are modified using a zinc-finger nuclease.
32. The method of paragraph 28, wherein the members of the population of TILs are modified using an RNA-guided nuclease.
33. The method of paragraph 32, wherein members of the population of TILs are modified using a Cas enzyme and at least one guide RNA.
34. The method of paragraph 33, wherein the Cas enzyme is Cas9.
35. The method of any one of paragraphs 28-34, wherein members of the population of TILs are modified at one or more genes selected from the group consisting of ANKRD11, BCL2L11, BCL3, BCOR, CALM2, CBLB, CHIC2, CTLA4, DHODH, E2F8, EGR2, FLI1, FOXP3, GATA3, GNAS, HAVCR2, IKZF1, IKZF2, IKZF3, LAG3, MAP4K, NFKBIA, NR4A3, NRP1, PBRM1, PCBP1, PDCD1, PELI1, PIK3CD, PPP2R2D, PTPN1, PTPN2, PTPN22, PTPN6, RBM39, RC3H1, SEMA7A, SERPINA3, SETD5, SH2B3, SH2D1A, SMAD2, SOCS1, TANK, TGFBR1, TGFBR2, TIGIT, TNFAIP3, TNIP1, TRAF6, UMPS, WDR6 and ZC3H12A.
36. The method of paragraph 35, wherein the modification at one or more genes is an insertion, deletion, or mutation of one or more nucleic acids.
37. The method of any one of paragraphs 35 and 36, wherein the modification at one or more genes results in the reduction or inhibition of expression of the gene and/or function of a protein encoded by the gene.
38. The method of paragraph 28, wherein members of the population of TILs are epigenetically modified.
39. The method of paragraph 38, wherein the epigenetic modification is a histone modification.
40. The method of paragraph 38, wherein members of the population of TILs are modified at one or more genes selected from the group consisting of ANKRD11, BCL2L1l, BCL3, BCOR, CALM2, CBLB, CHIC2, CTLA4, DHODH, E2F8, EGR2, FLI1, FOXP3, GATA3, GNAS, HAVCR2, IKZF1, IKZF2, IKZF3, LAG3, MAP4K, NFKBIA, NR4A3, NRP1, PBRM1, PCBP1, PDCD1, PELI1, PIK3CD, PPP2R2D, PTPN1, PTPN2, PTPN22, PTPN6, RBM39, RC3H, SEMA7A, SERPINA3, SETD5, SH2B3, SH2D1A, SMAD2, SOCS1, TANK, TGFBR1, TGFBR2, TIGIT, TNFAIP3, TNIP1, TRAF6, UMPS, WDR6 and ZC3H12A.
41. The method of paragraph 40, wherein the modification at one or more genes is methylation of one or more nucleic acids.
42. The method of any one of paragraphs 40 and 41, wherein the modification at one or more genes results in the reduction or inhibition of expression of the gene and/or function of a protein encoded by the gene.
43. The method of any one of paragraphs 35 and 40, wherein members of the population of TILs are modified at the SOCS1 gene.
44. The method of paragraph 43, wherein the modification of the SOCS1 gene results in the reduction or inhibition of expression of the gene and/or function of a protein encoded by the gene.
45. The method of any one of paragraphs 28-34, wherein members of the population of TILs are modified at more than one gene.
46. The method of paragraph 45, wherein members of the population of TILs are modified at the SOCS1 gene and one or more additional genes.
47. The method of paragraph 45, wherein members of the population of TILs are modified at the SOCS1 and PTPN2 genes.
48. The method of paragraph 47, wherein the modification of the SOCS1 and PTPN2 genes results in the reduction or inhibition of expression of the genes and/or function of proteins encoded by the gene.
49. The method of any one of the preceding paragraphs, wherein the first medium is supplemented with the T cell-stimulating cytokine at a time interval selected from the group consisting of 1 day, 2 days, 3 days, 4 days, 5 days, and 6 days.
50. The method of any one of the preceding paragraphs, wherein the first medium is changed at a time interval selected from the group consisting of 1 day, 2 days, 3 days, 4 days, 5 days, and 6 days.
51. The method of any one of the preceding paragraphs, wherein the second medium is changed at a time interval selected from the group consisting of 1 day, 2 days, 3 days, 4 days, 5 days, and 6 days.
52. The method of any one of the preceding paragraphs, wherein 30% to 99% of the first medium is changed at a time interval selected from the group consisting of 1 day, 2 days, 3 days, 4 days, 5 days, and 6 days.
53. The method of any one of the preceding paragraphs, wherein 30% to 99% of the second medium is changed at a time interval selected from the group consisting of 1 day, 2 days, 3 days, 4 days, 5 days, and 6 days.
54. The method of any one of the preceding paragraphs, wherein the TILs are expanded for up to 9, 10, 11, 12, 13, 14, 15, 16, 17, 18, 19, 20, 21, 22, 23, 24, or 25 days.
55. The method of any one of the preceding paragraphs, wherein the population of TILs is expanded for 9-25 days, 9-21 days, or 9-14 days.
56. The method of any one of the preceding paragraphs, wherein the population of TILs is expanded from 500 to 500,000-fold.
57. The method of any one of the preceding paragraphs, wherein the population of TILs is expanded from an initial population of from 100 to 100,000 TILs.
58. The method of any one of the preceding paragraphs, wherein the population of TILs is expanded at least 1,500-fold by day 14 of the expansion.
59. The method of paragraph 58, wherein the population of TILs is expanded at most 100,000-fold by day 14 of expansion.
60. The method of any one of the preceding paragraphs, wherein the population of TILs is expanded at least 15,000-fold by day 21 of the expansion.
61. The method of paragraph 60, wherein the population of TILs is expanded at most 500,000-fold by day 21 of expansion.
62. The method of any one of the preceding paragraphs, wherein the population of TILs is expanded to produce an expanded population of TILs, wherein at least 10% of the expanded population have a central memory T cell phenotype.
63. The method of any one of the preceding paragraphs, wherein the population of TILs is expanded to produce an expanded population of TILs, wherein at least 15% of the expanded population have a central memory T cell phenotype.
64. The method of any one of the preceding paragraphs, wherein the population of TILs is expanded to produce an expanded population of TILs, wherein 5 to 50% of the expanded population have a central memory T cell phenotype at day 14 of expansion.
65. The method of any one of the preceding paragraphs, wherein the population of TILs is expanded to produce an expanded population of TILs, wherein 10 to 25% of the expanded population have a central memory T cell phenotype at day 14 of expansion.
66. A composition comprising an expanded population of TILs produced by the method of any one of the preceding paragraphs.
67. A method of expanding a population of TILs, the method comprising the steps of: culturing a disaggregated tumor sample in a first medium comprising a T cell-stimulating cytokine to obtain a population of TILs; modifying members of the population of TILs using a gene-regulating system to obtain a modified population of TILs; and culturing the modified population of TILs in a second medium comprising a TCR agonist; feeder cells; and IL-15, thereby expanding the population of TILs.
68. The method of paragraph 67, wherein the T cell-stimulating cytokine is selected from the group consisting of IL-2, IL-7, IL-15, IL-21 and combinations thereof.
69. The method of paragraph 67, wherein the first medium does not comprise IL-2, IL-21, or both IL-2 and IL-21.
70. The method of any one of paragraphs 67-69, wherein the first medium does not comprise IL-2.
71. The method of any one of paragraphs 67-70, wherein the first medium does not comprise IL-21.
72. The method of any one of paragraphs 67-71, wherein the second medium does not comprise IL-21.
73. The method of any one of paragraphs 67-72, wherein the second medium does not comprise IL-2.
74. The method of any one of paragraphs 67-73, wherein the second medium further comprises IL-7.
75. The method of any one of paragraphs 67-74, wherein the final concentration of the T cell-stimulating cytokine in the first medium is from 1 U/ml to 7,000 U/ml.
76. The method of paragraph 74, wherein the final concentration of IL-7 in the second medium is from 1 U/ml to 7,000 U/ml.
77. The method of any one of paragraphs 67-76, wherein the final concentration of IL-15 in the second medium is from 10 ng/ml to 10,000 ng/ml.
78. The method of any one of paragraphs 67-77, wherein the final concentration of IL-15 is greater than 100 ng/ml.
79. The method of any one of paragraphs 67-78, wherein the TCR agonist is a CD3 agonist.
80. The method of any one of paragraphs 67-79, wherein the TCR agonist is an antibody.
81. The method of paragraph 80, wherein the antibody is a humanized antibody.
82. The method of any one of paragraphs 67-81, wherein the TCR agonist is OKT3 or UCHT1.
83. The method of any one of paragraphs 67-82, wherein the feeder cells express the TCR agonist.
84. The method of any one of paragraphs 67-83, wherein the feeder cells express an agonist of a T cell costimulatory molecule.
85. The method of paragraph 84, wherein the agonist of a T cell costimulatory molecule is a CD28 agonist.
86. The method of paragraph 84, wherein the agonist of a T cell costimulatory molecule is a CD137 agonist.
87. The method of paragraph 84, wherein the agonist of a T cell costimulatory molecule is a CD2 agonist.
88. The method of any one of paragraphs 83-87, wherein the TCR agonist and/or agonist of a T cell costimulatory molecule are expressed on the surface of the feeder cells.
89. The method of any one of paragraphs 67-88, wherein a 4-1BB ligand is expressed on the surface of the feeder cells.
90. The method of any one of paragraphs 67-89, wherein the feeder cells are peripheral blood mononuclear cells or antigen presenting cells.
91. The method of any one of paragraphs 67-90, wherein the feeder cells are genetically modified to express IL-15, IL-7, or both IL-15 and IL-7.
92. The method of any one of paragraphs 67-91, wherein the disaggregated tumor sample comprises tumor fragments that are 0.5 to 4 mm³ in size.
93. The method of any one of paragraphs 67-92, wherein the disaggregated tumor sample comprises digested tumor fragments.
94. The method of any one of paragraphs 67-93, wherein the disaggregated tumor sample was previously exposed to a pre-REP step that produced less than 100,000 TILs.
95. The method of any one of paragraphs 67-94, wherein the disaggregated tumor sample was previously exposed to a pre-REP step that expanded TILs present in the disaggregated tumor sample by less than 5-fold.
96. The method of any one of paragraphs 67-95, wherein the members of the population of TILs are modified using RNA interference.
97. The method of any one of paragraphs 67-95, wherein the members of the population of TILs are modified using a transcription activator-like effector nuclease (TALEN).
98. The method of any one of paragraphs 67-95, wherein the members of the population of TILs are modified using a zinc-finger nuclease.
99. The method of any one of paragraphs 67-95, wherein the members of the population of TILs are modified using an RNA-guided nuclease.
100. The method of paragraph 99, wherein members of the population of TILs are modified using a Cas enzyme and at least one guide RNA.
101. The method of paragraph 100, wherein the Cas enzyme is Cas9.
102. The method of any one of paragraphs 676-101, wherein members of the population of TILs are modified at one or more genes selected from the group consisting of ANKRD11, BCL2L11, BCL3, BCOR, CALM2, CBLB, CHIC2, CTLA4, DHODH, E2F8, EGR2, FLI1, FOXP3, GATA3, GNAS, HAVCR2, IKZF1, IKZF2, IKZF3, LAG3, MAP4K, NFKBIA, NR4A3, NRP1, PBRM1, PCBP1, PDCD1, PELI1, PIK3CD, PPP2R2D, PTPN1, PTPN2, PTPN22, PTPN6, RBM39, RC3H1, SEMA7A, SERPINA3, SETD5, SH2B3, SH2D1A, SMAD2, SOCS1, TANK, TGFBR1, TGFBR2, TIGIT, TNFAIP3, TNIP1, TRAF6, UMPS, WDR6 and ZC3H12A.
103. The method of paragraph 102, wherein the modification at one or more genes is an insertion, deletion, or mutation of one or more nucleic acids.
104. The method of any one of paragraphs 102 and 103, wherein the modification at one or more genes results in the reduction or inhibition of expression of the gene and/or function of a protein encoded by the gene.
105. The method of any one of paragraphs 67-95, wherein members of the population of TILs are epigenetically modified.
106. The method of paragraph 105, wherein the epigenetic modification is a histone modification.
107. The method of paragraph 105, wherein members of the population of TILs are modified at one or more genes selected from the group consisting of ANKRD11, BCL2L11, BCL3, BCOR, CALM2, CBLB, CHIC2, CTLA4, DHODH, E2F8, EGR2, FLI1, FOXP3, GATA3, GNAS, HAVCR2, IKZF1, IKZF2, IKZF3, LAG3, MAP4K, NFKBIA, NR4A3, NRP1, PBRM1, PCBP1, PDCD1, PELI1, PIK3CD, PPP2R2D, PTPN1, PTPN2, PTPN22, PTPN6, RBM39, RC3H1, SEMA7A, SERPINA3, SETD5, SH2B3, SH2D1A, SMAD2, SOCS1, TANK, TGFBR1, TGFBR2, TIGIT, TNFAIP3, TNIP1, TRAF6, UMPS, WDR6 and ZC3H12A.
108. The method of paragraph 107, wherein the modification at one or more genes is methylation of one or more nucleic acids.
109. The method of any one of paragraphs 107 and 108, wherein the modification at one or more genes results in the reduction or inhibition of expression of the gene and/or function of a protein encoded by the gene.
110. The method of any one of paragraphs 102 and 107, wherein members of the population of TILs are modified at the SOCS1 gene.
111. The method of paragraph 110, wherein the modification of the SOCS1 gene results in the reduction or inhibition of expression of the genes and/or function of proteins encoded by the genes.
112. The method of any one of paragraphs 67-101 and 105-106, wherein members of the population of TILs are modified at more than one gene.
113. The method of paragraph 112, wherein members of the population of TILs are modified at the SOCS1 gene and one or more additional genes.
114. The method of paragraph 112, wherein members of the population of TILs are modified at the SOCS1 and PTPN2 genes.
115. The method of paragraph 114, wherein the modification of the SOCS1 and PTPN2 genes results in the reduction or inhibition of expression of the gene and/or function of a protein encoded by the genes.
116. The method of any one of paragraphs 67-115, wherein the first medium is supplemented with the T cell-stimulating cytokine at a time interval selected from the group consisting of 1 day, 2 days, 3 days, 4 days, 5 days, and 6 days.
117. The method of any one of paragraphs 67-116, wherein the first medium is changed at a time interval selected from the group consisting of 1 day, 2 days, 3 days, 4 days, 5 days, and 6 days.
118. The method of any one of paragraphs 67-117, wherein the second medium is changed at a time interval selected from the group consisting of 1 day, 2 days, 3 days, 4 days, 5 days, and 6 days.
119. The method of any one of paragraphs 67-118, wherein 30% to 99% of the first medium is changed at a time interval selected from the group consisting of 1 day, 2 days, 3 days, 4 days, 5 days, and 6 days.
120. The method of any one of paragraphs 67-119, wherein 30% to 99% of the second medium is changed at a time interval selected from the group consisting of 1 day, 2 days, 3 days, 4 days, 5 days, and 6 days.
121. The method of any one of paragraphs 67-120, wherein the TILs are expanded for up to 9, 10, 11, 12, 13, 14, 15, 16, 17, 18, 19, 20, 21, 22, 23, 24, or 25 days.
122. The method of any one of paragraphs 67-121, wherein the population of TILs is expanded for 9-25 days, 9-21 days, or 9-14 days.
123. The method of any one of paragraphs 67-122, wherein the population of TILs is expanded from 500 to 500,000-fold.
124. The method of any one of paragraphs 67-123, wherein the population of TILs is expanded from an initial population of from 100 to 100,000 TILs.
125. The method of any one of paragraphs 67-124, wherein the population of TILs is expanded at least 1,500-fold by day 14 of the expansion.
126. The method of paragraph 125, wherein the population of TILs is expanded at most 100,000-fold by day 14 of expansion.
127. The method of any one of paragraphs 67-126, wherein the population of TILs is expanded at least 15,000-fold by day 21 of expansion.
128. The method of paragraph 127, wherein the population of TILs is expanded at most 500,000-fold by day 21 of expansion.
129. The method of any one of paragraphs 67-128, wherein the population of TILs is expanded to produce an expanded population of TILs, wherein at least 10% of the expanded population have a central memory T cell phenotype.
130. The method of any one of paragraphs 67-129, wherein the population of TILs is expanded to produce an expanded population of TILs, wherein at least 15% of the expanded population have a central memory T cell phenotype.
131. The method of any one of paragraphs 67-130, wherein the population of TILs is expanded to produce an expanded population of TILs, wherein 5 to 50% of the expanded population have a central memory T cell phenotype at day 14 of expansion.
132. The method of any one of paragraphs 67-131, wherein the population of TILs is expanded to produce an expanded population of TILs, wherein 10 to 25% of the expanded population have a central memory T cell phenotype at day 14 of expansion.
133. A composition comprising an expanded population of TILs produced by the method of any one of paragraphs 67-132.
134. A method of expanding a population of TILs in a disaggregated tumor sample, the method comprising culturing the disaggregated tumor sample in a culture medium comprising feeder cells; a TCR agonist; and IL-15, thereby expanding the population of TILs.
135. The method of paragraph 134, wherein the culture medium does not comprise IL-2, IL-21, or both IL-2 and IL-21.
136. The method of paragraph 134, wherein the culture medium does not comprise IL-21.
137. The method of paragraph 134, wherein the culture medium does not comprise IL-2.
138. The method of any one of paragraphs 134-137, wherein the culture medium further comprises IL-7.
139. The method of paragraph 138, wherein the final concentration of IL-7 in the culture medium is from 10 U/ml to 7,000 U/ml.
140. The method of any one of paragraphs 134-139, wherein the final concentration of IL-15 in the culture medium is from 10 ng/ml to 10,000 ng/ml.
141. The method of any one of paragraphs 134-140, wherein the final concentration of IL-15 in the culture medium is greater than 100 ng/ml.
142. The method of any one of paragraphs 134-141, wherein the TCR agonist is a CD3 agonist.
143. The method of any one of paragraphs 134-142, wherein the TCR agonist is an antibody.
144. The method of paragraph 143, wherein the antibody is a humanized antibody.
145. The method of any one of paragraphs 143-144, wherein the TCR agonist is OKT3 or UCHT1.
146. The method of any one of paragraphs 134-142, wherein the feeder cells express the TCR agonist.
147. The method of any one of paragraphs 134-146, wherein the feeder cells express an agonist of a T cell costimulatory molecule.
148. The method of paragraph 147, wherein the agonist of a T cell costimulatory molecule is a CD28 agonist.
149. The method of paragraph 147, wherein the agonist of a T cell costimulatory molecule is a CD137 agonist.
150. The method of paragraph 147, wherein the agonist of a T cell costimulatory molecule is a CD2 agonist.
151. The method of any one of paragraphs 147-150, wherein the TCR agonist and/or agonist of a T cell costimulatory molecule are expressed on the surface of the feeder cells.
152. The method of any one of paragraphs 134-151, wherein a 4-1BB ligand is expressed on the surface of the feeder cells.
153. The method of any one of paragraphs 134-152, wherein the feeder cells are peripheral blood mononuclear cells or antigen presenting cells.
154. The method of any one of paragraphs 134-153, wherein the feeder cells are genetically modified to express IL-15, IL-7, or both IL-15 and IL-7.
155. The method of any one of paragraphs 134-154, wherein the disaggregated tumor sample comprises tumor fragments that are 0.5 to 4 mm³ in size.
156. The method of any one of paragraphs 134-155, wherein the disaggregated tumor sample comprises digested tumor fragments.
157. The method of any one of paragraphs 134-156, wherein the disaggregated tumor sample was previously exposed to a pre-REP step that produced less than 100,000 TILs.
158. The method of any one of paragraphs 134-157, wherein the disaggregated tumor sample was previously exposed to a pre-REP step that expanded TILs present in the disaggregated tumor sample by less than 5-fold.
159. The method of any one of paragraphs 134-158, wherein members of the population of TILs are modified by a gene-regulating system.
160. The method of paragraph 159, wherein the members of the population of TILs are modified using RNA interference.
161. The method of paragraph 159, wherein the members of the population of TILs are modified using a transcription activator-like effector nuclease (TALEN).
162. The method of paragraph 159, wherein the members of the population of TILs are modified using a zinc-finger nuclease.
163. The method of paragraph 159, wherein the members of the population of TILs are modified using an RNA-guided nuclease.
164. The method of paragraph 163, wherein members of the population of TILs are modified using a Cas enzyme and at least one guide RNA.
165. The method of paragraph 164, wherein the Cas enzyme is Cas9.
166. The method of any one of paragraphs 159-165, wherein members of the population of TILs are modified at one or more genes selected from the group consisting of ANKRD11, BCL2L11, BCL3, BCOR, CALM2, CBLB, CHIC2, CTLA4, DHODH, E2F8, EGR2, FLI1, FOXP3, GATA3, GNAS, HAVCR2, IKZF1, IKZF2, IKZF3, LAG3, MAP4K, NFKBIA, NR4A3, NRP1, PBRM1, PCBP1, PDCD1, PELI1, PIK3CD, PPP2R2D, PTPN1, PTPN2, PTPN22, PTPN6, RBM39, RC3H1, SEMA7A, SERPINA3, SETD5, SH2B3, SH2D1A, SMAD2, SOCS1, TANK, TGFBR1, TGFBR2, TIGIT, TNFAIP3, TNIP1, TRAF6, UMPS, WDR6 and ZC3H12A.
167. The method of paragraph 166, wherein the modification at one or more genes is an insertion, deletion, or mutation of one or more nucleic acids.
168. The method of any one of paragraphs 166 and 167, wherein the modification at one or more genes results in the reduction or inhibition of expression of the gene and/or function of a protein encoded by the gene.
169. The method of any one of paragraphs 159, wherein members of the population of TILs are epigenetically modified.
170. The method of paragraph 169, wherein the epigenetic modification is a histone modification.
171. The method of paragraph 169, wherein members of the population of TILs are modified at one or more genes selected from the group consisting of ANKRD11, BCL2L1l, BCL3, BCOR, CALM2, CBLB, CHIC2, CTLA4, DHODH, E2F8, EGR2, FLI1, FOXP3, GATA3, GNAS, HAVCR2, IKZF1, IKZF2, IKZF3, LAG3, MAP4K, NFKBIA, NR4A3, NRP1, PBRM1, PCBP1, PDCD1, PELI1, PIK3CD, PPP2R2D, PTPN1, PTPN2, PTPN22, PTPN6, RBM39, RC3H, SEMA7A, SERPINA3, SETD5, SH2B3, SH2D1A, SMAD2, SOCS1, TANK, TGFBR1, TGFBR2, TIGIT, TNFAIP3, TNIP1, TRAF6, UMPS, WDR6 and ZC3H12A.
172. The method of paragraph 171, wherein the modification at one or more genes is methylation of one or more nucleic acids.
173. The method of any one of paragraphs 171 and 172, wherein the modification at one or more genes results in the reduction or inhibition of expression of the gene and/or function of a protein encoded by the gene.
174. The method of any one of paragraphs 166 and 171, wherein members of the population of TILs are modified at the SOCS1 gene.
175. The method of paragraph 174, wherein the modification of the SOCS1 gene results in the reduction or inhibition of expression of the genes and/or function of proteins encoded by the genes.
176. The method of any one of paragraphs 160-165 and 169-170, wherein members of the population of TILs are modified at more than one gene.
177. The method of paragraph 176, wherein members of the population of TILs are modified at the SOCS1 gene and one or more additional genes.
178. The method of paragraph 176, wherein members of the population of TILs are modified at the SOCS1 and PTPN2 genes.
179. The method of paragraph 178, wherein the modification of the SOCS1 and PTPN2 genes results in the reduction or inhibition of expression of the genes and/or function of proteins encoded by the genes.
180. The method of any one of paragraphs 134-179, wherein the culture medium is supplemented with IL-15 at a time interval selected from the group consisting of 1 day, 2 days, 3 days, 4 days, 5 days, and 6 days.
181. The method of any one of paragraphs 134-180, wherein the culture medium is changed at a time interval selected from the group consisting of 1 day, 2 days, 3 days, 4 days, 5 days, and 6 days.
182. The method of any one of paragraphs 134-181, wherein 30% to 99% of the culture medium is changed at a time interval selected from the group consisting of 1 day, 2 days, 3 days, 4 days, 5 days, and 6 days.
183. The method of any one of paragraphs 134-182, wherein the TILs are expanded for up to 9, 10, 11, 12, 13, 14, 15, 16, 17, 18, 19, 20, 21, 22, 23, 24, or 25 days.
184. The method of any one of paragraphs 134-183, wherein the population of TILs is expanded for 9-25 days, 9-21 days, or 9-14 days.
185. The method of any one of paragraphs 134-184, wherein the population of TILs is expanded from 500 to 500,000-fold.
186. The method of any one of paragraphs 134-184, wherein the population of TILs is expanded from an initial population of from 100 to 100,000 TILs.
187. The method of any one of paragraphs 134-186, wherein the population of TILs is expanded at least 1,500-fold by day 14 of the expansion.
188. The method of paragraph 187, wherein the population of TILs is expanded at most 100,000-fold by day 14 of expansion.
189. The method of any one of paragraphs 134-188, wherein the population of TILs is expanded at least 15,000-fold by day 21 of the expansion.
190. The method of paragraph 189, wherein the population of TILs is expanded at most 500,000-fold by day 21 of expansion.
191. The method of any one of paragraphs 134-190, wherein the population of TILs is expanded to produce an expanded population of TILs, wherein at least 10% of the expanded population have a central memory T cell phenotype.
192. The method of any one of paragraphs 134-191, wherein the population of TILs is expanded to produce an expanded population of TILs, wherein at least 15% of the expanded population have a central memory T cell phenotype.
193. The method of any one of paragraphs 134-192, wherein the population of TILs is expanded to produce an expanded population of TILs, wherein 5 to 50% of the expanded population have a central memory T cell phenotype at day 14 of expansion.
194. The method of any one of paragraphs 134-193, wherein the population of TILs is expanded to produce an expanded population of TILs, wherein 10 to 25% of the expanded population have a central memory T cell phenotype at day 14 of expansion.
195. A composition comprising an expanded population of TILs produced by the method of any one of paragraphs 134-194.
196. A method of expanding a population of TILs in a disaggregated tumor sample, the method comprising culturing the disaggregated tumor sample in a culture medium comprising a TCR agonist; an agonist of a T cell costimulatory molecule; and IL-15, thereby expanding the population of TILs.
197. The method of paragraph 196, wherein the culture medium does not comprise IL-2, IL-21, or both IL-2 and IL-21.
198. The method of paragraph 196, wherein the culture medium does not comprise IL-21.
199. The method of paragraph 196, wherein the culture medium does not comprise IL-2.
200. The method of any one of paragraphs 196-199, wherein the culture medium further comprises IL-7.
201. The method of paragraph 200, wherein the final concentration of IL-7 in the culture medium is from 10 U/ml to 7,000 U/ml.
202. The method of any one of paragraphs 196-201, wherein the final concentration of IL-15 in the culture medium is from 10 ng/ml to 10,000 ng/ml.
203. The method of any one of paragraphs 196-202, wherein the final concentration of IL-15 in the culture medium is greater than 100 ng/ml.
204. The method of any one of paragraphs 196-203, wherein the TCR agonist is a CD3 agonist.
205. The method of any one of paragraphs 196-204, wherein the TCR agonist is an antibody.
206. The method of paragraph 205, wherein the antibody is a humanized antibody.
207. The method of any one of paragraphs 205-206, wherein the TCR agonist is OKT3 or UCHT1.
208. The method of any one of paragraphs 205-206, wherein the TCR agonist comprises a soluble monospecific complex comprising two anti-CD3 antibodies linked together.
209. The method of any one of paragraphs 196-208, wherein the agonist of a T cell costimulatory molecule is selected from the group consisting of a CD28 agonist, a CD137 agonist, a CD2 agonist, and a combination thereof.
210. The method of any one of paragraphs 196-209, wherein the agonist of a T cell costimulatory molecule is a CD28 agonist.
211. The method of any one of paragraphs 209-210, wherein the CD28 agonist comprises a soluble monospecific complex comprising two anti-CD28 antibodies linked together.
212. The method of paragraph 209, wherein the CD2 agonist comprises a soluble monospecific complex comprising two anti-CD2 antibodies linked together.
213. The method of any one of paragraphs 196-212, wherein the TCR agonist and/or the agonist of a T cell costimulatory molecule are linked to a nanomatrix comprising a colloidal suspension of matrices of polymer chains, wherein each matrix is 1 to 500 nm in length in its largest dimension.
214. The method of paragraph 213, wherein the TCR agonist and the agonist of a T cell costimulatory molecule are attached to the same polymer chains.
215. The method of paragraph 213, wherein the TCR agonist and the agonist of a T cell costimulatory molecule are attached to different polymer chains.
216. The method of any one of paragraphs 213-215, wherein the TCR agonist is attached to the nanomatrix at 25 μg per mg of nanomatrix.
217. The method of any one of paragraphs 196-216, wherein the disaggregated tumor sample comprises tumor fragments that are 0.5 to 4 mm³ in size.
218. The method of any one of paragraphs 196-217, wherein the disaggregated tumor sample comprises digested tumor fragments.
219. The method of any one of paragraphs 196-218, wherein the disaggregated tumor sample was previously exposed to a pre-REP step that produced less than 100,000 TILs.
220. The method of any one of paragraphs 196-219, wherein the disaggregated tumor sample was previously exposed to a pre-REP step that expanded TILs present in the disaggregated tumor sample by less than 5-fold.
221. The method of any one of paragraphs 196-220, wherein members of the population of TILs are modified by a gene-regulating system.
222. The method of paragraph 221, wherein the members of the population of TILs are modified using RNA interference.
223. The method of paragraph 221, wherein the members of the population of TILs are modified using a transcription activator-like effector nuclease (TALEN).
224. The method of paragraph 221, wherein the members of the population of TILs are modified using a zinc-finger nuclease.
225. The method of paragraph 221, wherein the members of the population of TILs are modified using an RNA-guided nuclease.
226. The method of paragraph 225, wherein members of the population of TILs are modified using a Cas enzyme and at least one guide RNA.
227. The method of paragraph 226, wherein the Cas enzyme is Cas9.
228. The method of any one of paragraphs 221-227, wherein members of the population of TILs are modified at one or more genes selected from the group consisting of ANKRD11, BCL2L11, BCL3, BCOR, CALM2, CBLB, CHIC2, CTLA4, DHODH, E2F8, EGR2, FLI1, FOXP3, GATA3, GNAS, HAVCR2, IKZF1, IKZF2, IKZF3, LAG3, MAP4K, NFKBIA, NR4A3, NRP1, PBRM1, PCBP1, PDCD1, PELI1, PIK3CD, PPP2R2D, PTPN1, PTPN2, PTPN22, PTPN6, RBM39, RC3H, SEMA7A, SERPINA3, SETD5, SH2B3, SH2D1A, SMAD2, SOCS1, TANK, TGFBR1, TGFBR2, TIGIT, TNFAIP3, TNIP1, TRAF6, UMPS, WDR6 and ZC3H12A.
229. The method of paragraph 228, wherein the modification at one or more genes is an insertion, deletion, or mutation of one or more nucleic acids.
230. The method of any one of paragraphs 228 and 229, wherein the modification at one or more genes results in the reduction or inhibition of expression of the gene and/or function of a protein encoded by the gene.
231. The method of paragraph 221, wherein members of the population of TILs are epigenetically modified.
232. The method of paragraph 231, wherein the epigenetic modification is a histone modification.
233. The method of paragraph 231, wherein members of the population of TILs are modified at one or more genes selected from the group consisting of ANKRD11, BCL2L11, BCL3, BCOR, CALM2, CBLB, CHIC2, CTLA4, DHODH, E2F8, EGR2, FLI1, FOXP3, GATA3, GNAS, HAVCR2, IKZF1, IKZF2, IKZF3, LAG3, MAP4K, NFKBIA, NR4A3, NRP1, PBRM1, PCBP1, PDCD1, PELI1, PIK3CD, PPP2R2D, PTPN1, PTPN2, PTPN22, PTPN6, RBM39, RC3H, SEMA7A, SERPINA3, SETD5, SH2B3, SH2D1A, SMAD2, SOCS1, TANK, TGFBR1, TGFBR2, TIGIT, TNFAIP3, TNIP1, TRAF6, UMPS, WDR6 and ZC3H12A.
234. The method of paragraph 233, wherein the modification at one or more genes is methylation of one or more nucleic acids.
235. The method of any one of paragraphs 233 and 234, wherein the modification at one or more genes results in the reduction or inhibition of expression of the gene and/or function of a protein encoded by the gene.
236. The method of any one of paragraphs 228 and 233, wherein members of the population of TILs are modified at the SOCS1 gene.
237. The method of paragraph 236, wherein the modification of the SOCS1 gene results in the reduction or inhibition of expression of the gene and/or function of a protein encoded by the gene.
238. The method of any one of paragraphs 222-227 and 231-232, wherein members of the population of TILs are modified at more than one gene.
239. The method of paragraph 238, wherein members of the population of TILs are modified at the SOCS1 and PTPN2 genes.
240. The method of paragraph 239, wherein the modification of the SOCS1 and PTPN2 genes results in the reduction or inhibition expression of the genes and/or function of proteins encoded by the genes.
241. The method of any one of paragraphs 196-240, wherein the culture medium is supplemented with IL-15 at a time interval selected from the group consisting of 1 day, 2 days, 3 days, 4 days, 5 days, and 6 days.
242. The method of any one of paragraphs 196-241, wherein the culture medium is changed at a time interval selected from the group consisting of 1 day, 2 days, 3 days, 4 days, 5 days, and 6 days.
243. The method of any one of paragraphs 196-242, wherein 30% to 99% of the culture medium is changed at a time interval selected from the group consisting of 1 day, 2 days, 3 days, 4 days, 5 days, and 6 days.
244. The method of any one of paragraphs 196-243, wherein the TILs are expanded for up to 9, 10, 11, 12, 13, 14, 15, 16, 17, 18, 19, 20, 21, 22, 23, 24, or 25 days.
245. The method of any one of paragraphs 196-244, wherein the population of TILs is expanded for 9-25 days, 9-21 days, or 9-14 days.
246. The method of any one of paragraphs 196-245, wherein the population of TILs is expanded from 500 to 500,000-fold.
247. The method of any one of paragraphs 196-245, wherein the population of TILs is expanded from an initial population of from 100 to 100,000 TILs.
248. The method of any one of paragraphs 196-247, wherein the population of TILs is expanded at least 1,500-fold by day 14 of the expansion.
249. The method of paragraph 248, wherein the population of TILs is expanded at most 100,000-fold by day 14 of expansion.
250. The method of any one of paragraphs 196-249, wherein the population of TILs is expanded at least 15,000-fold by day 21 of the expansion.
251. The method of paragraph 250, wherein the population of TILs is expanded at most 500,000-fold by day 21 of expansion.
252. The method of any one of paragraphs 196-251, wherein the population of TILs is expanded to produce an expanded population of TILs, wherein at least 10% of the expanded population have a central memory T cell phenotype.
253. The method of any one of paragraphs 196-252, wherein the population of TILs is expanded to produce an expanded population of TILs, wherein at least 15% of the expanded population have a central memory T cell phenotype.
254. The method of any one of paragraphs 196-252, wherein the population of TILs is expanded to produce an expanded population of TILs, wherein 5 to 50% of the expanded population have a central memory T cell phenotype at day 14 of expansion.
255. The method of any one of paragraphs 196-253, wherein the population of TILs is expanded to produce an expanded population of TILs, wherein 10 to 25% of the expanded population have a central memory T cell phenotype at day 14 of expansion.
256. The method of any one of paragraphs 196-255, wherein the medium does not comprise feeder cells.
257. The method of any one of paragraphs 196-255, wherein the medium further comprises feeder cells.
258. The method of paragraph 257, wherein a 4-1BB ligand is expressed on the surface of the feeder cells.
259. The method of any one of paragraphs 257-258, wherein the feeder cells are peripheral blood mononuclear cells or antigen presenting cells.
260. The method of any one of paragraphs 257-259, wherein the feeder cells are genetically modified to express IL-15, IL-7, or both IL-15 and IL-7.
261. A composition comprising an expanded population of TILs produced by the method of any one of paragraphs 196-260.
262. A method for expanding a population of tumor infiltrating lymphocytes (TILs) comprising: culturing the population of TILs in a culture medium comprising IL-15, and a nanomatrix comprising a colloidal suspension of matrices of polymer chains, wherein the matrices are attached to TCR agonists and agonists of a T cell costimulatory molecule, wherein each matrix is 1 to 500 nm in length in its largest dimension and wherein the method does not comprise the use of feeder cells during expansion of the population of TILs.
263. The method of paragraph 262, wherein the culture medium does not comprise IL-2, IL-21, or both IL-2 and IL-21.
264. The method of paragraph 262, wherein the culture medium does not comprise IL-21.
265. The method of paragraph 262, wherein the culture medium does not comprise IL-2.
266. The method of any one of paragraphs 262-265, wherein the culture medium further comprises IL-7.
267. The method of paragraph 266, wherein the final concentration of IL-7 in the culture medium is from 10 U/ml to 7,000 U/ml.
268. The method of any one of paragraphs 262-267, wherein the final concentration of IL-15 in the culture medium is from 10 ng/ml to 10,000 ng/ml.
269. The method of any one of paragraphs 262-268, wherein the final concentration of IL-15 in the culture medium is greater than 100 ng/ml.
270. The method of any one of paragraphs 262-269, wherein the TCR agonist is a CD3 agonist.
271. The method of any one of paragraphs 262-270, wherein the agonist of a T cell costimulatory molecule is a CD28 agonist.
272. The method of any one of paragraphs 262-271, wherein the agonists are recombinant agonists.
273. The method of any one of paragraphs 262-272, wherein the agonists are antibodies.
274. The method of paragraph 273, wherein the antibodies are humanized antibodies.
275. The method of paragraph 270, wherein the CD3 agonist is OKT3 or UCHT1.
276. The method of any one of paragraphs 262-275, wherein the TCR agonists and agonists of a T cell costimulatory molecule are attached to the same polymer chains.
277. The method of any one of paragraphs 262-275, wherein the TCR agonists and agonists of a T cell costimulatory molecule are attached to different polymer chains.
278. The method of any one of paragraphs 262-277, wherein the TCR agonists are attached to the matrices at 25 μg per mg of matrix.
279. The method of any one of paragraphs 213 and 262-278, wherein the agonist of a T cell costimulatory molecule is attached to the matrices at 25 μg per mg of matrix.
280. The method of any one of paragraphs 213 and 262-279, wherein the nanomatrix further comprises magnetic, paramagnetic or superparamagnetic nanocrystals embedded among or within the matrices of polymer chains.
281. The method of any one of paragraphs 213 and 262-280 wherein the matrices of polymer chains comprise a polymer of dextran.
282. The method of any one of paragraphs 213 and 262-281, wherein the polymer chains are colloidal polymer chains.
283. The method of any one of paragraphs 213 and 262-282, wherein the population of TILs cultured with the nanomatrix further comprises tumor cells.
284. The method of any one of paragraphs 213 and 262-283, wherein the ratio of volume of nanomatrix to volume of TILs is greater than or equal to 1:5.
285. The method of any one of paragraphs 213 and 262-284, wherein the ratio of number of matrices to TILs is greater than or equal to 1:500.
286. The method of any one of paragraphs 262-285, wherein the TILs to be expanded are from a subject who had previously submitted a sample of TILs for expansion, wherein the previous TIL expansion comprises a pre-REP step and wherein the number of TILs isolated from the pre-REP step was less than 100,000 TILs.
287. The method of any one of paragraphs 262-286, wherein the TILs to be expanded are from a subject who had previously submitted a sample of TILs for expansion, wherein the previous TIL expansion comprises a pre-REP step and wherein the fold expansion of TILs isolated from the pre-REP step was less than 5-fold.
288. The method of any one of paragraphs 262-287, wherein members of the population of TILs are modified by a gene-regulating system.
289. The method of paragraph 288, wherein the members of the population of TILs are modified using RNA interference.
290. The method of paragraph 288, wherein the members of the population of TILs are modified using a transcription activator-like effector nuclease (TALEN).
291. The method of paragraph 288, wherein the members of the population of TILs are modified using a zinc-finger nuclease.
292. The method of paragraph 288, wherein the members of the population of TILs are modified using an RNA-guided nuclease.
293. The method of paragraph 292, wherein members of the population of TILs are modified using a Cas enzyme and at least one guide RNA.
294. The method of paragraph 293, wherein the Cas enzyme is Cas9.
295. The method of any one of paragraphs 288-294, wherein members of the population of TILs are modified at one or more genes selected from the group consisting of ANKRD11, BCL2L11, BCL3, BCOR, CALM2, CBLB, CHIC2, CTLA4, DHODH, E2F8, EGR2, FLI1, FOXP3, GATA3, GNAS, HAVCR2, IKZF1, IKZF2, IKZF3, LAG3, MAP4K, NFKBIA, NR4A3, NRP1, PBRM1, PCBP1, PDCD1, PELI1, PIK3CD, PPP2R2D, PTPN1, PTPN2, PTPN22, PTPN6, RBM39, RC3H1, SEMA7A, SERPINA3, SETD5, SH2B3, SH2D1A, SMAD2, SOCS1, TANK, TGFBR1, TGFBR2, TIGIT, TNFAIP3, TNIP1, TRAF6, UMPS, WDR6 and ZC3H12A.
296. The method of paragraph 295, wherein the modification at one or more genes is an insertion, deletion, or mutation of one or more nucleic acids.
297. The method of any one of paragraphs 295 and 296, wherein the modification at one or more genes results in the reduction or inhibition of expression of the gene and/or function of a protein encoded by the gene.
298. The method of paragraph 288, wherein members of the population of TILs are epigenetically modified.
299. The method of paragraph 298, wherein the epigenetic modification is a histone modification.
300. The method of paragraph 298, wherein members of the population of TILs are modified at one or more genes selected from the group consisting of ANKRD11, BCL2L11, BCL3, BCOR, CALM2, CBLB, CHIC2, CTLA4, DHODH, E2F8, EGR2, FLI1, FOXP3, GATA3, GNAS, HAVCR2, IKZF1, IKZF2, IKZF3, LAG3, MAP4K, NFKBIA, NR4A3, NRP1, PBRM1, PCBP1, PDCD1, PELI1, PIK3CD, PPP2R2D, PTPN1, PTPN2, PTPN22, PTPN6, RBM39, RC3H, SEMA7A, SERPINA3, SETD5, SH2B3, SH2D1A, SMAD2, SOCS1, TANK, TGFBR1, TGFBR2, TIGIT, TNFAIP3, TNIP1, TRAF6, UMPS, WDR6 and ZC3H12A.
301. The method of paragraph 300, wherein the modification at one or more genes is methylation of one or more nucleic acids.
302. The method of any one of paragraphs 300 and 301, wherein the modification at one or more genes results in the reduction or inhibition of expression of the gene and/or function of a protein encoded by the gene.
303. The method of any one of paragraphs 295 and 300, wherein members of the population of TILs are modified at the SOCS1 gene.
304. The method of paragraph 303, wherein the modification of the SOCS1 gene results in the reduction or inhibition of expression of the gene and/or function of a protein encoded by the gene.
305. The method of any one of paragraphs 289-294 and 298-299, wherein members of the population of TILs are modified at more than one gene.
306. The method of paragraph 305, wherein members of the population of TILs are modified at the SOCS1 and PTPN2 genes.
307. The method of paragraph 306, wherein the modification of the SOCS1 and PTPN2 genes results in the reduction or inhibition of expression of the genes and/or function of proteins encoded by the genes.
308. The method of any one of paragraphs 262-307, wherein the TILs are contacted with IL-15 at a time interval selected from the group consisting of 1 day, 2 days, 3 days, 4 days, 5 days, and 6 days.
309. The method of any one of paragraphs 262-308, wherein the TILs are expanded for up to 9, 10, 11, 12, 13, 14, 15, 16, 17, 18, 19, 20, 21, 22, 23, 24, or 25 days.
310. The method of any one of paragraphs 262-309, wherein the population of TILs is expanded for 9-25 days, 9-21 days, or 9-14 days.
311. The method of any one of paragraphs 262-309, wherein the population of TILs is expanded from 500 to 500,000-fold.
312. The method of any one of paragraphs 262-309, wherein the population of TILs is expanded from an initial population of from 100 to 100,000 TILs.
313. The method of any one of paragraphs 262-312, wherein the population of TILs is expanded at least 1,500-fold by day 14 of the expansion.
314. The method of paragraph 313, wherein the population of TILs is expanded at most 100,000-fold by day 14 of expansion.
315. The method of any one of paragraphs 262-314, wherein the population of TILs is expanded at least 15,000-fold by day 21 of the expansion.
316. The method of paragraph 315, wherein the population of TILs is expanded at most 500,000-fold by day 21 of expansion.
317. The method of any one of paragraphs 262-316, wherein the population of TILs is expanded to produce an expanded population of TILs, wherein at least 10% of the expanded population have a central memory T cell phenotype.
318. The method of any one of paragraphs 262-317, wherein the population of TILs is expanded to produce an expanded population of TILs, wherein at least 15% of the expanded population have a central memory T cell phenotype.
319. The method of any one of paragraphs 262-317, wherein the population of TILs is expanded to produce an expanded population of TILs, wherein 5 to 50% of the expanded population have a central memory T cell phenotype at day 14 of expansion.
320. The method of any one of paragraphs 262-319, wherein the population of TILs is expanded to produce an expanded population of TILs, wherein 10 to 25% of the expanded population have a central memory T cell phenotype at day 14 of expansion.
321. The method of any one of paragraphs 262-320, wherein the population of TILs further comprises tumor cells.
322. A composition comprising an expanded population of TILs produced by the method of any one of paragraphs 262-321.
323. A method for expanding a population of TILs comprising culturing the population of TILs in a culture medium comprising IL-15; and a first soluble monospecific complex comprising an anti-CD3 antibody or fragment thereof, a second soluble monospecific complex comprising an anti-CD28 antibody or fragment thereof, and a third soluble monospecific complex comprising an anti-CD2 antibody or fragment thereof, wherein each soluble monospecific complex comprises two antibodies, or fragments thereof, linked together, and each antibody, or fragments thereof, of each soluble monospecific complex specifically binds to the same antigen on the population of TILs.
324. The method of paragraph 323, wherein the culture medium does not comprise IL-2, IL-21, or both IL-2 and IL-21.
325. The method of paragraph 323, wherein the culture medium does not comprise IL-21.
326. The method of paragraph 323, wherein the culture medium does not comprise IL-2.
327. The method of any one of paragraphs 323-326, wherein the culture medium further comprises IL-7.
328. The method of paragraph 327, wherein the final concentration of IL-7 in the culture medium is from 10 U/ml to 7,000 U/ml.
329. The method of any one of paragraphs 323-328, wherein the final concentration of IL-15 in the culture medium is from 10 ng/ml to 10,000 ng/ml.
330. The method of any one of paragraphs 323-329, wherein the final concentration of IL-15 in the culture medium is greater than 100 ng/ml.
331. The method of any one of paragraphs 323-330, wherein the soluble monospecific complexes are tetrameric antibody complexes (TACs).
332. The method of paragraph 331, wherein each TAC comprises two antibodies from a first animal species bound by two antibody molecules from a second species that specifically bind to the Fc portion of the antibodies from the first animal species.
333. The method of any one of paragraphs 323-332, wherein the anti-CD3 antibody is OKT3 or UCHT1.
334. The method of any one of paragraphs 323-333, wherein the population of TILs contacted with the composition further comprises tumor cells.
335. The method of any one of paragraphs 323-334, wherein the method does not comprise the use of feeder cells during expansion of the population of TILs.
336. The method of any one of paragraphs 323-335, wherein the soluble monospecific complexes are at a concentration of 0.2-25 μL/ml.
337. The method of any of one of paragraphs 323-336, wherein the population of TILs to be expanded are from a subject who had previously submitted a sample of TILs for expansion, wherein the previous TIL expansion comprises a pre-REP step and wherein the number of TILs isolated from the pre-REP step was less than 100,000 TILs.
338. The method of any of one of paragraphs 323-336, wherein the TILs to be expanded are from a subject who had previously submitted a sample of TILs for expansion, wherein the previous TIL expansion comprises a pre-REP step and wherein the fold expansion of TILs isolated from the pre-REP step was less than 5-fold.
339. The method of any one of paragraphs 323-338, wherein members of the population of TILs are modified by a gene-regulating system.
340. The method of paragraph 339, wherein the members of the population of TILs are modified using RNA interference.
341. The method of paragraph 339, wherein the members of the population of TILs are modified using a transcription activator-like effector nuclease (TALEN).
342. The method of paragraph 339, wherein the members of the population of TILs are modified using a zinc-finger nuclease.
343. The method of paragraph 340, wherein the members of the population of TILs are modified using an RNA-guided nuclease.
344. The method of paragraph 339, wherein members of the population of TILs are modified using a Cas enzyme and at least one guide RNA.
345. The method of paragraph 344, wherein the Cas enzyme is Cas9.
346. The method of any one of paragraphs 339-345, wherein members of the population of TILs are modified at one or more genes selected from the group consisting of ANKRD11, BCL2L11, BCL3, BCOR, CALM2, CBLB, CHIC2, CTLA4, DHODH, E2F8, EGR2, FLI1, FOXP3, GATA3, GNAS, HAVCR2, IKZF1, IKZF2, IKZF3, LAG3, MAP4K, NFKBIA, NR4A3, NRP1, PBRM1, PCBP1, PDCD1, PELI1, PIK3CD, PPP2R2D, PTPN1, PTPN2, PTPN22, PTPN6, RBM39, RC3H1, SEMA7A, SERPINA3, SETD5, SH2B3, SH2D1A, SMAD2, SOCS1, TANK, TGFBR1, TGFBR2, TIGIT, TNFAIP3, TNIP1, TRAF6, UMPS, WDR6 and ZC3H12A.
347. The method of paragraph 346, wherein the modification at one or more genes is an insertion, deletion, or mutation of one or more nucleic acids.
348. The method of any one of paragraphs 346 and 347, wherein the modification at one or more genes results in the reduction or inhibition of expression of the gene and/or function of a protein encoded by the gene.
349. The method of paragraph 349, wherein members of the population of TILs are epigenetically modified.
350. The method of paragraph 349, wherein the epigenetic modification is a histone modification.
351. The method of paragraph 349, wherein members of the population of TILs are modified at one or more genes selected from the group consisting of ANKRD11, BCL2L11, BCL3, BCOR, CALM2, CBLB, CHIC2, CTLA4, DHODH, E2F8, EGR2, FLI1, FOXP3, GATA3, GNAS, HAVCR2, IKZF1, IKZF2, IKZF3, LAG3, MAP4K, NFKBIA, NR4A3, NRP1, PBRM1, PCBP1, PDCD1, PELI1, PIK3CD, PPP2R2D, PTPN1, PTPN2, PTPN22, PTPN6, RBM39, RC3H1, SEMA7A, SERPINA3, SETD5, SH2B3, SH2D1A, SMAD2, SOCS1, TANK, TGFBR1, TGFBR2, TIGIT, TNFAIP3, TNIP1, TRAF6, UMPS, WDR6 and ZC3H12A.
352. The method of paragraph 351, wherein the modification at one or more genes is methylation of one or more nucleic acids.
353. The method of any one of paragraphs 351 and 352, wherein the modification at one or more genes results in the reduction or inhibition of expression of the gene and/or function of a protein encoded by the gene.
354. The method of any one of paragraphs 346 and 351, wherein members of the population of TILs are modified at the SOCS1 gene.
355. The method of paragraph 354, wherein the modification of the SOCS1 gene results in the reduction or inhibition of expression of the gene and/or function of a protein encoded by the gene.
356. The method of any one of paragraphs 340-345 and 349-350, wherein members of the population of TILs are modified at more than one gene.
357. The method of paragraph 356, wherein members of the population of TILs are modified at the SOCS1 and PTPN2 genes.
358. The method of paragraph 357, wherein the modification of the SOCS1 and PTPN2 genes results in the reduction or inhibition of expression of the genes and/or function of proteins encoded by the genes.
359. The method of any one of paragraphs 323-358, wherein the TILs are contacted with IL-15 at a time interval selected from the group consisting of 1 day, 2 days, 3 days, 4 days, 5 days, and 6 days.
360. The method of any one of paragraphs 323-359, wherein the population of TILs are expanded for up to 9, 10, 11, 12, 13, 14, 15, 16, 17, 18, 19, 20, 21, 22, 23, 24, or 25 days.
361. The method of any one of paragraphs 323-360, wherein the population of TILs are expanded for 9-25 days, 9-21 days, or 9-14 days.
362. The method of any one of paragraphs 323-361, wherein the TILs are expanded from 500 to 500,000-fold.
363. The method of any one of paragraphs 323-361, wherein the population of TILs is expanded from an initial population of from 100 to 100,000 TILs.
364. The method of any one of paragraphs 323-363, wherein the population of TILs is expanded at least 1,500-fold by day 14 of the expansion.
365. The method of paragraph 364, wherein the population of TILs is expanded at most 100,000-fold by day 14 of expansion.
366. The method of any one of paragraphs 323-365, wherein the population of TILs is expanded at least 15,000-fold by day 21 of the expansion.
367. The method of paragraph 366, wherein the population of TILs is expanded at most 500,000-fold by day 21 of expansion.
368. The method of any one of paragraphs 323-367, wherein the population of TILs is expanded to produce an expanded population of TILs, wherein at least 10% of the expanded population have a central memory T cell phenotype.
369. The method of any one of paragraphs 323-368, wherein the population of TILs is expanded to produce an expanded population of TILs, wherein at least 15% of the expanded population have a central memory T cell phenotype.
370. The method of any one of paragraphs 323-367, wherein the population of TILs is expanded to produce an expanded population of TILs, wherein 5 to 50% of the expanded population have a central memory T cell phenotype at day 14 of expansion.
371. The method of any one of paragraphs 323-370, wherein the population of TILs is expanded to produce an expanded population of TILs, wherein 10 to 25% of the expanded population have a central memory T cell phenotype at day 14 of expansion.
372. The method of any one of paragraphs 323-371, wherein the population of TILs is isolated from a subject and contacted with the culture medium without an additional expansion process of the population of TILs prior to contacting the population of TILs with the culture medium.
373. A composition comprising an expanded population of TILs produced by the method of any one of paragraphs 323-372.
374. A method of expanding, in a one or two step culture, a population of TILs in a disaggregated tumor sample, the method comprising culturing the disaggregated tumor sample in a culture medium comprising a T cell-stimulating cytokine; feeder cells; and a TCR agonist, wherein the T cell-stimulating cytokine consists of greater than 100 ng/ml IL-15, thereby expanding the population of TILs.
375. The method of paragraph 374, wherein members of the population of TILs are modified by a gene-regulating system.
376. The method of paragraph 375, wherein members of the population of TILs are modified at the SOCS1 gene.
377. The method of any one of paragraphs 35, 40, 102, 107, 166, 171, 228, 233, 295, 300, 346 and 351, wherein the one or more genes are selected from the group consisting of SOCS1, PTPN2, ZC3H12A, CBLB, RC3H1 and NFKBIA.
378. The method of paragraph 377, wherein the one or more genes are selected from the group consisting of SOCS1 and PTPN2.
379. The method of paragraph 377, wherein the one or more genes are selected from the group consisting of SOCS1 and ZC3H12A.
380. The method of any one of paragraphs 43, 46, 110, 113, 174, 177, 236, 303 and 354, wherein one or more genes additional genes are modified and wherein the one or more additional genes are selected from the group consisting of ZC3H12A, PTPN2, CBLB, RC3H1 and NFKBIA.
381. The method of any of the preceding paragraphs wherein the exhaustion of the cultured population of TILs is reduced and/or the cytotoxicity of the cultured population of TILs is increased.
382. The method of paragraph 381, wherein the population of TILs is modified at the SOCS1 gene.
383. The method of paragraph 382, wherein the modification of the SOCS1 gene results in the reduction or inhibition of expression of the gene and/or function of a protein encoded by the gene.
384. The method of any one of paragraphs 381-383, wherein the population of TILs comprise a reduction in expression of one or more exhaustion related genes selected from PTGER2, FASLG, TNFRSF9, IRF4, CTLA4, EOMES, PDPN, LAG3, TNFSF9, CD86, TIGIT, HAVCR2, CASP3, PROCR, MDFIC, CCL3, CD160, BATF, TOX, CD244, B3GAT1, KLRG1, LILRB4 and PDCD1 relative to TILs modified at the SOCS1 gene and cultured in culture medium without IL-15.
385. The method of any one of paragraphs 381-383 wherein the expression levels of one or more cytotoxicity related genes selected from ITGB2, CSF2, TNF, FASLG, TNFRSF10B, LCK, IFNG, IFNB1, BID, GZMB, PRF1, KLRK1, ZAP70, FYN, GZMA, VAV3, GZMH, GZMM, KIR3DL1, IFNGR2, VAV1, SOS2, PTPN6, PTK2B, SH3BP2, LAT, KLRC2, IFNA1, CASP3, ICAMI, SH2D1A, ARAF, NFATC1, IFNAR1, NCR1, NCR3, IFNGR1, NCR2, TYROBP, FCGR3B, KLRD1, FAS, CD244, RAC2 and CD247 are increased relative to TILs un-modified at the SOCS1 gene and cultured in culture medium with IL-15.
386. The method of any one of paragraphs 381-385, wherein the exhaustion score is reduced.
387. The method of any one of paragraphs 381-386, wherein the cytotoxicity score is increased.
388. The method of any one of paragraphs 381-387, wherein the exhaustion score is reduced, and the cytotoxicity score is increased.

[0785] In one aspect, the present disclosure provides methods of expanding a population of TILs, comprising the steps of culturing a disaggregated tumor sample in a first medium comprising a T cell-stimulating cytokine to obtain a population of TILs; and culturing the population of TILs in a second medium comprising a T cell receptor (TCR) agonist; feeder cells; and greater than 100 ng/ml IL-15, wherein the second medium does not comprise IL-2, thereby expanding the population of TILs.

[0786] In another aspect, the present disclosure provides methods of expanding a population of TILs comprising the steps of culturing a disaggregated tumor sample in a first medium comprising a T cell-stimulating cytokine to obtain a population of TILs; modifying members of the population of TILs using a gene-regulating system to obtain a modified population of TILs; and culturing the modified population of TILs in a second medium comprising a TCR agonist; feeder cells; and IL-15, thereby expanding the population of TILs.

[0787] In another aspect, the present disclosure provides methods of expanding a population of TILs in a disaggregated tumor sample comprising culturing the disaggregated tumor sample in a culture medium comprising feeder cells; a TCR agonist; and IL-15, thereby expanding the population of TILs.

[0788] In another aspect, the present disclosure provides methods of expanding, in a one or two step culture, a population of TILs in a disaggregated tumor sample comprising culturing the disaggregated tumor sample in a culture medium comprising a T cell-stimulating cytokine; feeder cells; and a TCR agonist, wherein the T cell-stimulating cytokine consists of greater than 100 ng/ml IL-15, thereby expanding the population of TILs.

[0789] In another aspect, the present disclosure provides methods of expanding a population of TILs in a disaggregated tumor sample comprising culturing the disaggregated tumor sample in a culture medium comprising a TCR agonist; an agonist of a T cell costimulatory molecule; and IL-15, thereby expanding the population of TILs.

[0790] In another aspect, the present disclosure provides methods for expanding a population of TILs comprising culturing the population of TILs in a culture medium comprising IL-15 and a nanomatrix comprising a colloidal suspension of matrices of polymer chains, wherein the matrices are attached to TCR agonists and agonists of a T cell costimulatory molecule, wherein each matrix is about 1 to about 500 nm in length in its largest dimension and wherein the method does not comprise the use of feeder cells during expansion of the population of TILs.

[0791] In another aspect, the present disclosure provides methods for expanding a population of TILs comprising culturing the population of TILs in a culture medium comprising IL-15; and a first soluble monospecific complex comprising an anti-CD3 antibody or fragment thereof, a second soluble monospecific complex comprising an anti-CD28 antibody or fragment thereof, and a third soluble monospecific complex comprising an anti-CD2 antibody or fragment thereof, wherein each soluble monospecific complex comprises two antibodies, or fragments thereof, linked together, and each antibody, or fragments thereof, of each soluble monospecific complex specifically binds to the same antigen on the population of TILs.

[0792] In some embodiments, the final concentration of IL-15 in the culture medium is from about 10 ng/ml to about 10,000 ng/ml. In some embodiments, the final concentration of IL-15 in the culture medium is from about 10 ng/ml to about 50 ng/ml. In some embodiments, the final concentration of IL-15 in the culture medium is from about 10 ng/ml to about 75 ng/ml. In some embodiments, the final concentration of IL-15 in the culture medium is less than 10,000 ng/ml, optionally less than 9000, 8000, 7000, 6000, 5000, 4000, 3000, 2000, or 1000 ng/ml. In some embodiments, the final concentration of IL-15 in the culture medium is greater than 100 ng/ml. In some embodiments, the final concentration of IL-15 in the culture medium is greater than 150 ng/ml. In some embodiments, the final concentration of IL-15 in the culture medium is greater than 200 ng/ml. In some embodiments, the final concentration of IL-15 in the second medium is greater than 100 ng/ml. In some embodiments, the final concentration of IL-15 in the second medium is greater than 150 ng/ml. In some embodiments, the final concentration of IL-15 in the second medium is greater than 200 ng/ml. In further embodiments, the final concentration of IL-15 in the second medium is greater than 100 ng/ml and less than 1000 ng/ml, optionally less than 900, 800, 700, 600, 500, 400, 300 or 200 ng/ml and optionally more than 150 or 200 ng/ml. In further embodiments, the final concentration of IL-15 in the second medium is less than or equal to 10,000 ng/ml, optionally less than or equal to 9000, 8000, 7000, 6000, 5000, 4000, 3000, 2000, or 1000 ng/ml. In some embodiments, the final concentration of IL-15 in the second medium is from 10 ng/ml to 10,000 ng/ml.

[0793] In some embodiments, the T cell-stimulating cytokine is selected from the group consisting of IL-2, IL-7, IL-15, IL-21, and combinations thereof. In some embodiments, the final concentration of the T cell-stimulating cytokine in the first medium is from about 10 U/ml to about 7,000 U/ml.

[0794] In some embodiments, the culture medium does not comprise IL-2, IL-21, or both IL-2 and IL-21. In some embodiments, the culture medium does not comprise IL-2. In some embodiments, the culture medium does not comprise IL-21. In some embodiments, the first medium does not comprise IL-2, IL-21, or both IL-2 and IL-21. In some embodiments, the second medium does not comprise IL-2, IL-21, or both IL-2 and IL-21. In some embodiments, the first medium does not comprise IL-2. In some embodiments, the second medium does not comprise IL-2. In some embodiments, the first medium does not comprise IL-21. In some embodiments, the second medium does not comprise IL-21.

[0795] In some embodiments, the culture medium further comprises IL-7. In one embodiment, the final concentration of IL-7 in the culture medium is from 10 U/ml to 7,000 U/ml. In some embodiments, the second medium further comprises IL-7. In certain embodiments, the final concentration of IL-7 in the second medium is from 10 U/ml to 7,000 U/ml.

[0796] In some embodiments, the first medium is supplemented with the T cell-stimulating cytokine at a time interval selected from the group consisting of 1 day, 2 days, 3 days, 4 days, 5 days, and 6 days. In some embodiments, the first medium is changed at a time interval selected from the group consisting of 1 day, 2 days, 3 days, 4 days, 5 days, and 6 days. In some embodiments, 30% to 99% of the first medium is changed at a time interval selected from the group consisting of 1 day, 2 days, 3 days, 4 days, 5 days, and 6 days.

[0797] In some embodiments, the second medium is changed at a time interval selected from the group consisting of 1 day, 2 days, 3 days, 4 days, 5 days, and 6 days. In some embodiments, 30% to 99% of the second medium is changed at a time interval selected from the group consisting of 1 day, 2 days, 3 days, 4 days, 5 days, and 6 days.

[0798] In some embodiments, the TCR agonists and agonists of a T cell costimulatory molecule are attached to the same polymer chains. In some embodiments, the TCR agonists and agonists of a T cell costimulatory molecule are attached to different polymer chains. In some embodiments, the TCR agonists are attached to the matrices at about 25 μg per mg of matrix. In some embodiments, the agonist of a T cell costimulatory molecule is attached to the matrices at about 25 μg per mg of matrix.

[0799] In some embodiments, the nanomatrix further comprises magnetic, paramagnetic or superparamagnetic nanocrystals embedded among or within the matrices of polymer chains. In some embodiments, the matrices of polymer chains comprise a polymer of dextran. In certain embodiments, the polymer chains are colloidal polymer chains.

[0800] In some embodiments, the population of TILs further comprises tumor cells. In some embodiments, the population of TILs cultured with the nanomatrix further comprises tumor cells. In some embodiments, the ratio of volume of nanomatrix to volume of TILs is greater than or equal to 1:5. In some embodiments, the ratio of number of matrices to TILs is greater than or equal to 1:500.

[0801] In some embodiments, the soluble monospecific complexes are tetrameric antibody complexes (TACs). In some embodiments, each TAC comprises two antibodies from a first animal species bound by two antibody molecules from a second species that specifically bind to the Fc portion of the antibodies from the first animal species.

[0802] In some embodiments, the agonists are recombinant agonists. In some embodiments, the TCR agonist is a CD3 agonist. In some embodiments, the TCR agonist is an antibody. In some embodiments, the antibody is a humanized antibody. In some embodiments, the TCR agonist is an antibody such as, e.g., OKT3 or UCHT1.

[0803] In some embodiments, the feeder cells are peripheral blood mononuclear cells. In some embodiments, the feeder cells are antigen presenting cells.

[0804] In some embodiments, the feeder cells express the TCR agonist. In some embodiments, the feeder cells express an agonist of a T cell costimulatory molecule. In specific embodiments, the TCR agonist and/or agonist of a T cell costimulatory molecule are expressed on the surface of the feeder cells. In one embodiment, the agonist of a T cell costimulatory molecule is a CD28 agonist. In one embodiment, the agonist of a T cell costimulatory molecule is a CD137 agonist. In one embodiment, the agonist of a T cell costimulatory molecule is a CD2 agonist.

[0805] In some embodiments, a 4-1BB ligand is expressed on the surface of the feeder cells.

[0806] In some embodiments, the feeder cells are genetically modified to express IL-15, IL-7, or both IL-15 and IL-7.

[0807] In some embodiments, the methods described herein do not comprise the use of feeder cells during expansion of the population of TILs.

[0808] In some embodiments, the soluble monospecific complexes are at a concentration of about 0.2 to about 25 μL/ml.

[0809] In some embodiments, the disaggregated tumor sample comprises digested tumor fragments. In some embodiments, the disaggregated tumor sample comprises tumor fragments that are 0.5 to 4 mm³ in size.

[0810] In some embodiments, the disaggregated tumor sample was previously exposed to a pre-REP step that produced less than 100,000 TILs. In some embodiments, the disaggregated tumor sample was previously exposed to a pre-REP step that expanded TILs present in the disaggregated tumor sample by less than 5-fold.

[0811] In some embodiments, members of the population of TILs are modified by a gene-regulating system. In some embodiments, the members of the population of TILs are modified using RNA interference. In some embodiments, the members of the population of TILs are modified using a transcription activator-like effector nuclease (TALEN). In some embodiments, the members of the population of TILs are modified using a zinc-finger nuclease. In one embodiment, the members of the population of TILs are modified using an RNA-guided nuclease. In some embodiments, members of the population of TILs are modified using a Cas enzyme, such as e.g., Cas9, and at least one guide RNA.

[0812] In some embodiments, members of the population of TILs are modified at one or more genes selected from the group consisting of ANKRD11, BCL2L11, BCL3, BCOR, CALM2, CBLB, CHIC2, CTLA4, DHODH, E2F8, EGR2, FLI1, FOXP3, GATA3, GNAS, HAVCR2, IKZF1, IKZF2, IKZF3, LAG3, MAP4K, NFKBIA, NR4A3, NRP1, PBRM1, PCBP1, PDCD1, PELI1, PIK3CD, PPP2R2D, PTPN1, PTPN2, PTPN22, PTPN6, RBM39, RC3H1, SEMA7A, SERPINA3, SETD5, SH2B3, SH2DA, SMAD2, SOCS1, TANK, TGFBR1, TGFBR2, TIGIT, TNFAIP3, TNIP1, TRAF6, UMPS, WDR6 and ZC3H12A. In some embodiments, members of the population of TILs are modified at one or more genes selected from the group consisting of SOCS1, PTPN2, ZC3H12A, CBLB, RC3H1 and NFKBIA. In some embodiments, the modification at a one or more genes is an insertion, deletion, or mutation of one or more nucleic acids. In some embodiments, the modification at a single gene is an epigenetic modification, such as e.g., a histone modification. In some embodiments, the modification at a single gene is methylation of one or more nucleic acids. In one embodiment, the modification at a single gene results in the reduction or inhibition of expression of the gene and/or function of a protein encoded by the gene.

[0813] In some embodiments, members of the population of TILs are modified at the SOCS1 gene. In some embodiments, the modification of the SOCS1 gene results in the reduction or inhibition of expression of the gene and/or function of a protein encoded by the gene.

[0814] In some embodiments, members of the population of TILs are modified at the SOCS1 gene and the ZC3H12A gene. In some embodiments, the modification of the SOCS1 gene and the ZC3H12A gene results in the reduction or inhibition of expression of the gene and/or function of a protein encoded by the gene.

[0815] In some embodiments, members of the population of TILs are modified at more than one gene. In some embodiments the two or more genes are selected from the group consisting of ANKRD11, BCL2L11, BCL3, BCOR, CALM2, CBLB, CHIC2, CTLA4, DHODH, E2F8, EGR2, FLI1, FOXP3, GATA3, GNAS, HAVCR2, IKZF1, IKZF2, IKZF3, LAG3, MAP4K, NFKBIA, NR4A3, NRP1, PBRM1, PCBP1, PDCD1, PELI1, PIK3CD, PPP2R2D, PTPN1, PTPN2, PTPN22, PTPN6, RBM39, RC3H, SEMA7A, SERPINA3, SETD5, SH2B3, SH2D1A, SMAD2, SOCS1, TANK, TGFBR1, TGFBR2, TIGIT, TNFAIP3, TNIP1, TRAF6, UMPS, WDR6 and ZC3H12A. In some embodiments, members of the population of TILs are modified at two or more genes selected from the group consisting of SOCS1, PTPN2, ZC3H12A, CBLB, RC3H and NFKBIA. In some embodiments, members of the population of TILs are modified at the SOCS1 gene and one or more additional genes. In some embodiments, members of the population of TILs are modified at the SOCS1 and ZC3H12A, PTPN2, CBLB, RC3H or NFKBIA. In a specific embodiment, members of the population of TILs are modified at the SOCS1 and PTPN2 genes. In a specific embodiment, members of the population of TILs are modified at the SOCS1 and ZC3H12A genes. In some embodiments, the modification of the SOCS1 and ZC3H12A, PTPN2, CBLB, RC3H or NFKBIA genes results in the reduction or inhibition of expression of the genes and/or function of proteins encoded by the genes.

[0816] In some embodiments, the TILs are expanded for up to 9, 10, 11, 12, 13, 14, 15, 16, 17, 18, 19, 20, 21, 22, 23, 24, or 25 days. In some embodiments, the population of TILs is expanded for 9-25 days, 9-21 days, or 9-14 days. In some embodiments, the population of TILs is expanded 500 to 500,000-fold. In some embodiments, the population of TILs is expanded from an initial population of TILs of 100 to 100,000 TILs. In some embodiments, the population of TILs is expanded at least 1,500-fold by day 14 of the expansion. In some embodiments, the population of TILs is expanded at most 100,000-fold by day 14 of expansion. In some embodiments, the population of TILs is expanded at least 15,000-fold by day 21 of the expansion. In some embodiments, the population of TILs is expanded at most 500,000-fold by day 21 of expansion.

[0817] In some embodiments, the population of TILs is expanded to produce an expanded population of TILs, wherein at least 10% of the expanded population have a central memory T cell phenotype. In some embodiments, the population of TILs is expanded to produce an expanded population of TILs, wherein at least 15% of the expanded population have a central memory T cell phenotype. In some embodiments, the population of TILs is expanded to produce an expanded population of TILs, wherein 5 to 50% of the expanded population have a central memory T cell phenotype at day 14 of expansion. In some embodiments, the population of TILs is expanded to produce an expanded population of TILs, wherein 10 to 25% of the expanded population have a central memory T cell phenotype at day 14 of expansion.

[0818] In some embodiments, the population of TILs is isolated from a subject and contacted with the first medium without an additional expansion process of the population of TILs prior to contacting the population of TILs with the first medium. In some embodiments, the population of TILs is isolated from a subject and contacted with the culture medium without an additional expansion process of the population of TILs prior to contacting the population of TILs with the culture medium.

[0819] In some embodiments, the exhaustion of the cultured population of TILs is reduced and/or the cytotoxicity of the cultured population of TILs is increased. In some embodiments, the population of TILs is modified at the SOCS1 gene. In some embodiments, the population of TILs is modified at the SOCS1 gene and the ZC3H12A gene. In some embodiments, the modification of the SOCS1 and/or the ZC3H12A gene results in the reduction or inhibition of expression of the gene and/or function of a protein encoded by the gene. In some embodiments, the population of TILs comprise a reduction in expression of one or more exhaustion related genes selected from PTGER2, FASLG, TNFRSF9, IRF4, CTLA4, EOMES, PDPN, LAG3, TNFSF9, CD86, TIGIT, HAVCR2, CASP3, PROCR, MDFIC, CCL3, CD160, BATF, TOX, CD244, B3GAT1, KLRG1, LILRB4 and PDCD1 relative to TILs modified at the SOCS1 gene and cultured in culture medium without IL-15. In some embodiments, the expression levels of one or more cytotoxicity related genes selected from ITGB2, CSF2, TNF, FASLG, TNFRSF10B, LCK, IFNG, IFNB1, BID, GZMB, PRF1, KLRK1, ZAP70, FYN, GZMA, VAV3, GZMH, GZMM, KIR3DL1, IFNGR2, VAV1, SOS2, PTPN6, PTK2B, SH3BP2, LAT, KLRC2, IFNA1, CASP3, ICAMI, SH2D1A, ARAF, NFATC1, IFNAR1, NCR1, NCR3, IFNGR1, NCR2, TYROBP, FCGR3B, KLRD1, FAS, CD244, RAC2 and CD247 are increased relative to TILs un-modified at the SOCS1 gene and cultured in culture medium with IL-15. In some embodiments, the exhaustion score is reduced. In some embodiments, the cytotoxicity score is increased. In some embodiments, the exhaustion score is reduced, and the cytotoxicity score is increased.

[0820] In another aspect, the present disclosure provides compositions comprising an expanded population of TILs produced by any of the methods disclosed herein.

### EXAMPLES

[0821] The following examples are put forth so as to provide those of ordinary skill in the art with a complete disclosure and description of how to make and use the methods and compositions featured in the invention and are not intended to limit the scope of what the inventors regard as their invention.

### Example 1: Two Step Methods for Expanding TILs

[0822] TILs from at least 5 independent subjects were expanded using a two-step method. In the first step, the TILs were expanded from single cell suspensions of primary human melanoma metastases by incubating the cells in the presence of 6000 U/ml recombinant human IL-2 for up to 5 weeks. The expanded TILs are referred to as pre-REP TILs. In this example, pre-REP TILs were subsequently edited with CRISPR/Cas9 at the OR1A1 locus, a gene not expressed in T cells.

[0823] In the second step, pre-REP TILs were expanded in a REP as follows. On Day 0 of the REP, 100,000 live pre-REP TILs were taken and seeded into the wells of a 24 well Grex plate (Wilson Wolf, Cat #80192M) in a 6 ml volume of TIL media (a 1:1 mixture of RPMI 1640 and AIM V, supplemented with 5% human AB serum) containing 20M previously irradiated (6,000 rads) pooled PBMC feeder cells (from five healthy donors in a 1:1:1:1:1 ratio) and further supplemented with 180 ng OKT3 (Biolegend Cat #317326). Subsequently, to the “conventional process” wells was added recombinant human IL-2 (CellGenix, Cat #1020-1000) to a final concentration of 6000 U/ml. To the “IL15 Process” wells was added recombinant human IL-15 (Peprotech Cat #200-15) to a final concentration of 1000 ng/ml. To the “IL7/15 process A” wells was added recombinant human IL-7 (Peprotech, Cat #200-07) and recombinant human IL-15 (Peprotech, Cat #200-15) to a final concentration of 10 ng/ml and 300 ng/ml, respectively. To the “IL7/15 process B” wells was added recombinant human IL-7 (Peprotech, Cat #200-07) and recombinant human IL-15 (Peprotech, Cat #200-15) to a final concentration of 10 ng/ml and 1000 ng/ml, respectively.

[0824] On Day 2 of the REP, to the “conventional process” wells was added recombinant human IL-2 (CellGenix, Cat #1020-1000) to a final concentration of 6000 U/ml, assuming consumption of previously added cytokine. To the “IL15 Process” wells was added recombinant human IL-15 (Peprotech Cat #200-15) to a final concentration of 1000 ng/ml, assuming consumption of previously added cytokine. To the “IL7/15 process A” wells was added recombinant human IL-7 (Peprotech, Cat #200-07) and recombinant human IL-15 (Peprotech, Cat #200-15) to a final concentration of 10 ng/ml and 300 ng/ml, respectively, assuming consumption of the previously added cytokines. To the “IL7/15 process B” wells was added recombinant human IL-7 (Peprotech, Cat #200-07) and recombinant human IL-15 (Peprotech, Cat #200-15) to a final concentration of 10 ng/ml and 1000 ng/ml, respectively, assuming consumption of the previously added cytokines.

[0825] On Day 5 of the REP, a 50% media exchange was performed by removing 3 ml of the media from the wells and replacing with 3 ml of fresh REP media. Subsequently, to the “conventional process” wells was added recombinant human IL-2 (CellGenix, Cat #1020-1000) to a final concentration of 6000 U/ml, assuming consumption of previously added cytokine. To the “IL15 Process” wells was added recombinant human IL-15 (Peprotech Cat #200-15) to a final concentration of 1000 ng/ml, assuming consumption of previously added cytokine. To the “IL7/15 process A” wells was added recombinant human IL-7 (Peprotech, Cat #200-07) and recombinant human IL-15 (Peprotech, Cat #200-15) to a final concentration of 10 ng/ml and 300 ng/ml, respectively, assuming consumption of the previously added cytokines. To the “IL7/15 process B” wells was added recombinant human IL-7 (Peprotech, Cat #200-07) and recombinant human IL-15 (Peprotech, Cat #200-15) to a final concentration of 10 ng/ml and 1000 ng/ml, respectively, assuming consumption of the previously added cytokines.

[0826] On Day 7 of the REP, cells were transferred to a 6-well Grex plate (Wilson Wolf, Cat #80660M). To each well was added 90 ml of REP media. Subsequently, to the “conventional process” wells was added recombinant human IL-2 (CellGenix, Cat #1020-1000) to a final concentration of 6000 U/ml, assuming consumption of previously added cytokine. To the “IL15 Process” wells was added recombinant human IL-15 (Peprotech Cat #200-15) to a final concentration of 1000 ng/ml, assuming consumption of previously added cytokine. To the “IL7/15 process A” wells was added recombinant human IL-7 (Peprotech, Cat #200-07) and recombinant human IL-15 (Peprotech, Cat #200-15) to a final concentration of 10 ng/ml and 300 ng/ml, respectively, assuming consumption of the previously added cytokines. To the “IL7/15 process B” wells was added recombinant human IL-7 (Peprotech, Cat #200-07) and recombinant human IL-15 (Peprotech, Cat #200-15) to a final concentration of 10 ng/ml and 1000 ng/ml, respectively, assuming consumption of the previously added cytokines.

[0827] On Day 9 of the REP, a 50% media exchange was performed by removing 50 ml of media and replacing it with 50 ml of fresh REP media. Subsequently, to the “conventional process” wells was added recombinant human IL-2 (CellGenix, Cat #1020-1000) to a final concentration of 6000 U/ml, assuming consumption of previously added cytokine. To the “IL15 Process” wells was added recombinant human IL-15 (Peprotech Cat #200-15) to a final concentration of 1000 ng/ml, assuming consumption of previously added cytokine. To the “IL7/15 process A” wells was added recombinant human IL-7 (Peprotech, Cat #200-07) and recombinant human IL-15 (Peprotech, Cat #200-15) to a final concentration of 10 ng/ml and 300 ng/ml, respectively, assuming consumption of the previously added cytokines. To the “IL7/15 process B” wells was added recombinant human IL-7 (Peprotech, Cat #200-07) and recombinant human IL-15 (Peprotech, Cat #200-15) to a final concentration of 10 ng/ml and 1000 ng/ml, respectively, assuming consumption of the previously added cytokines.

[0828] On day 12 of the REP, 70 ml of media was removed from the wells. Cells were resuspended in the remaining 30 ml of media and split 1:3 such that 3 independent wells of a 6-well Grex plate could be seeded from a single well by transferring 10 ml of cell suspension to the new wells. 90 ml of fresh REP media was added to each well. Subsequently, to the “conventional process” wells was added recombinant human IL-2 (CellGenix, Cat #1020-1000) to a final concentration of 6000 U/ml, assuming consumption of previously added cytokine. To the “IL15 Process” wells was added recombinant human IL-15 (Peprotech Cat #200-15) to a final concentration of 1000 ng/ml, assuming consumption of previously added cytokine. To the “IL7/15 process A” wells was added recombinant human IL-7 (Peprotech, Cat #200-07) and recombinant human IL-15 (Peprotech, Cat #200-15) to a final concentration of 10 ng/ml and 300 ng/ml, respectively, assuming consumption of the previously added cytokines. To the “IL7/15 process B” wells was added recombinant human IL-7 (Peprotech, Cat #200-07) and recombinant human IL-15 (Peprotech, Cat #200-15) to a final concentration of 10 ng/ml and 1000 ng/ml, respectively, assuming consumption of the previously added cytokines.

[0829] On day 14 of the REP, cells were harvested and counted. Cell fold expansions and viabilities are represented in FIGS. 1A-1B. REP of cells in media containing IL-7 and IL-15 supported cell expansion and increased viability, when compared to REPs in IL2 containing media.

### Example 2: Phenotypic Characterization of TILs Generated in Example 1

[0830] The cellular composition of TILs after the TIL expansion process was assessed by flow cytometry (FIGS. 2A-2B). Cells were cultured as in Example 1, and an aliquot of cells was stained on day 14 post initiation of the REP with antibodies to detect cells that express CD45, CD3e, CD8, CCR7, and CD45RO. REP of cells in IL-15 or IL7/IL15 containing medias did not significantly impact the proportion of TILs that were CD8+ (FIG. 2A) compared to REP in IL2 containing media. However, a significant increase in the proportion of TILs that were designated as “T central memory cells” (defined as CD45+ CCR7+ CD45RO+) (FIG. 2B) was observed when REPs were carried out in IL15 or IL7/15 containing media, compared to REPs carried out using IL2 containing media.

### Example 3: Polyfunctionality of TILs Produced Using IL7/IL15 Process

[0831] Cytokine driven expansion of T cells can lead to terminal differentiation, which is associated with a loss in functionality of T cells such that they are no longer protective. In particular, it has been observed that the most effective, potent anti-tumor T cells maintain the ability to produce IFNγ, TNFα, IL-2, as well as degranulate in response to stimulation. To determine polyfunctionality of TILs generated in IL7/IL15 REP containing methods, TILs produced as in Example 1 were stimulated for 4 hours with a PMA/Ionomycin cell stimulation cocktail (Invitrogen Cat #LS00497003). During the stimulation, a fluorescent anti-CD107a antibody was incubated with the cells to identify cells that are actively degranulating in response to stimulation. Subsequently, cells were fixed and stained intracellularly for the production of IFNγ, IL-2, and TNFα. Of note, CD8+ TILs generated using the IL7/IL15 process demonstrated maintenance of ability to degranulate (FIG. 3A) with a high degree of polyfunctionality. Many CD107a+ cells were IFNγ+ IL-2+ (FIG. 3B), CD107a+ TNFα+ IL-2+ (FIG. 3C), and CD107a+ IFNγ+ TNFα+ (FIG. 3D). Cells generated with the highest doses of IL-15 trended toward increased polyfunctionality. Similarly, CD4 T cells within the TIL population generated using the IL7/IL15 REP process also maintained a polyfunctional cytokine secretion profile comparable to those generated in the IL2 REP process.

### Example 4: Methods to Genetically Engineer and Subsequently Expand TILs Using CRISPR-Cas9

[0832] TILs expanded using the protocols described in Example 1 were genetically engineered using CRISPR-Cas9 to create functional genetic knockouts of a target gene. This genetic engineering was performed after the pre-REP expansion, but before the cells were seeded into the REP. Briefly, pre-REP TILs were centrifuged at 300×g for 5 minutes, and resuspended to 30M cells/ml in MaxCyte electroporation buffer (HyClone Cat #EPB1). Subsequently, a ribonucleoprotein (RNP) master mix was made containing 52 pmol Cas9 protein (Aldevron, Cat #9212) and 240 pmol of sgRNA targeting the OR1A1, SOCS1, or PTPN2 loci, or a combination of 120 pmol SOCS1 and 120 pmol PTPN2 was made. The RNP mastermix was made as follows: A 100 μM solution of sgRNA was made by resuspending lyophilized sgRNA in Nuclease Free Duplex Buffer (IDT Cat #1072570). Reagents were added as shown in Table 38 for OR1A1 or SOCS1:

TABLE 38
RNP mastermix for OR1A1 or SOCS1 targeting.

| | Vol (μL) |
|---|---|
| ORIA1 (Guide Sequence | 9.6 |
| GCTGACCAGTAACTCCCAGG (SEQ ID | |
| NO: 912) or SOCS1 (Guide Sequence | |
| ACGCCTGCGGATTCTACTGG (SEQ ID | |
| NO: 70) sgRNA (100 μM) | |
| Cas9 (61 μM) | 3.4 |
| DPBS (IX) | 7 |

[0833] Reagents were added as shown in Table 39 for the combination of SOCS1 and PTPN2:

TABLE 39
RNP mastermix for SOCS1 and PTPN2 targeting.

| | Vol (μL) |
|---|---|
| SOCS1 (Guide Sequence | 4.8 |
| ACGCCTGCGGATTCTACTGG (SEQ ID NO; | |
| 70)) sgRNA (100 μM) | |
| PTPN2 (Guide Sequence | 4.8 |
| GGAAACTTGGCCACTCTATG (SEQ ID NO; | |
| 206) sgRNA (100 μM) | |
| Cas9 (61 μM) | 3.4 |
| DPBS (1X) | 7 |

[0834] The entire 20 μL of the RNP master mix was added to 80 μL of cell suspension (at 30M cells/ml). The complete 100 μL reaction was then transferred to an OC100×2 processing assembly (MaxCyte, Cat #SOC-1X2). Cells were electroporated on a MaxCyte ExPERT electroporator using the “Optimization #9” program. Subsequently, 100 μL REP media was added to the well and cells were transferred to a 96-well plate containing 100 μL REP media, which was then incubated at 37° C. for 20 minutes. Subsequently, cells were counted, and 100K live cells were then seeded into a 24 well Grex plate containing 6 ml TIL media supplemented with either 6,000 U/ml IL-2 (Conventional Process), 1000 ng/ml IL15 (IL15 Process), 10 ng/ml IL7 and 300 ng/ml IL15 (IL7/15 process A) or 10 ng/ml IL-7 and 1000 ng/ml IL15 (IL7/IL15 Process B). Cells were then cultured as in Example 1 through the REP.

[0835] The degree to which TILs were edited by the process was assessed post REP, using next generation amplicon sequencing. On average, across at least 5 subjects and multiple repeats, editing efficiencies at the OR1A1 locus (when single editing) ranged from 53-87%, editing efficiencies at the SOCS1 locus (when single editing) ranged from 75-93%, editing efficiencies at the SOCS1 locus (when dual editing) were 91-93%, and editing efficiencies at the PTPN2 locus (when dual editing) were 92-94%. Editing efficiency was not dramatically impacted by cytokine conditions in REP.

[0836] The cytokines present during the REP did impact the TIL yields for some of the cells. On average, REP of OR1A1-edited T cells in IL15 or IL7 and IL15 containing media produced at least as many TIL as REP of those same cells in IL2 (FIG. 4A). When TILs were edited for SOCS1 and subsequently expanded, REP in IL15-containing or IL7 and IL15-containing media led to an approximately 1.5× increase in cell yields compared to the cells expanded in IL-2 (FIG. 4B). When cells were dual-edited for SOCS1 and PTPN2 and subsequently expanded, compared to the conventional process, the IL15 process led to a ˜1.5-fold increase in cell yields, the IL7/15 Process A led to a ˜2-fold increase in cell yields, and the IL7/15 process B led to a ˜3-fold increase in cell yields (FIG. 4C)

### Example 5: Two Step Methods for Expanding Tumor Infiltrating Lymphocytes (TILs) Using Artificial Antigen Presenting Cells

[0837] TILs are expanded using a two-step method. In the first step, the TILs are expanded from single cell suspensions of primary human melanoma metastases by incubating the cells in the presence of 6000 U/ml recombinant human IL-2, or in the presence of 10 ng/ml IL-7 and 1000 ng/ml IL-15 for up to 5 weeks. These are referred to as pre-REP TILs.

[0838] In the second step, pre-REP TILs are expanded in a modified REP as follows. On Day 0 of the REP, 100,000 live pre-REP TIL are taken and seeded into the wells of a 24 well Grex plate (Wilson Wolf, Cat #80192M) in a 6 ml volume of TIL media (a 1:1 mixture of RPMI 1640 and AIM V, supplemented with 5% human AB serum) containing 100,000 to 20M previously irradiated (15,000 rads) artificial antigen presenting cells. Artificial antigen presenting cells are tumor cells, such as K562 cells, that have been previously modified to additionally express OS8 (membrane bound OKT3), and additionally CD80, CD86, 41BBL, and/or IL-15 receptor alpha. Media is further supplemented with 1-50 ng/ml IL-7 and/or 500-2000 ng/ml IL-15. Media can be further supplemented with about 10 ng/ml IL-7 and/or about 1000 ng/ml IL-15.

[0839] On Day 2 of the modified REP, 10-1000 ng/ml IL-7 and/or 10-1000 ng/ml IL-15 are added, assuming consumption of previously added cytokines.

[0840] On Day 5 of the REP, a 50% media exchange is performed by removing 3 ml of the media from the wells and replacing with 3 ml of fresh REP media. Subsequently, 10-1000 ng/ml IL-7 and/or 10-1000 ng/ml IL-15 are added, assuming consumption of previously added cytokines.

[0841] On Day 7 of the REP, cells are transferred to a 6-well Grex plate (Wilson Wolf, Cat #80660M). To each well is added 90 ml of REP media. Subsequently, 10-1000 ng/ml IL-7 and/or 10-1000 ng/ml IL-15 are being added, assuming consumption of previously added cytokines.

[0842] On Day 9 of the REP, a 50% media exchange is performed by removing 50 ml of media and replacing it with 50 ml of fresh REP media. Subsequently, 10-1000 ng/ml IL-7 and/or 10-1000 ng/ml IL-15 are added, assuming consumption of previously added cytokines.

[0843] On day 12 of the REP, 70 ml of media is removed from the wells. Cells are resuspended in the remaining 30 ml of media and split 1:3 such that 3 independent wells of a 6-well Grex plate are seeded from a single well by transferring 10 ml of cell suspension to the new wells. 90 ml of fresh REP media is added to each well. Subsequently, 10-1000 ng/ml IL-7 and/or 10-1000 ng/ml IL-15 are added, assuming consumption of previously added cytokines.

[0844] On day 14 of the REP, cells are harvested and counted.

### Example 6: Expansion of TILs Using 1L7/1L15 in a 1 Step, PBMC Feeder Free Method (K562)

[0845] TILs are expanded directly from single cell suspensions of primary human melanoma metastases. On Day 0 of the culture, single cell suspensions are taken and seeded into the wells of a 24 well Grex plate (Wilson Wolf, Cat #80192M) in a 6 ml volume of TIL media (a 1:1 mixture of RPMI 1640 and AIM V, supplemented with 5% human AB serum) and supplemented with 1-50 ng/ml recombinant IL-7 and 500-2000 ng/ml IL-15. Media can be further supplemented with about 10 ng/ml IL-7 and/or about 1000 ng/ml IL-15. Further added to the wells are artificial antigen presenting cells (aAPC), such as K562 cells, which have been modified to express OS8 (membrane bound OKT3), CD80, CD86, and/or 41BBL. Cells are seeded such that there is a 1 T cells:1 aAPC to a 1 T cell: 200 aAPC ratio.

[0846] On Day 2 of the expansion, 10-1000 ng/ml IL-7 and/or 10-1000 ng/ml IL-15 are added, assuming consumption of previously added cytokines.

[0847] On Day 5 of the expansion, a 50% media exchange is performed by removing 3 ml of the media from the wells and replacing with 3 ml of fresh REP media. Subsequently, 10-1000 ng/ml IL-7 and/or 10-1000 ng/ml IL-15 are being added, assuming consumption of previously added cytokines.

[0848] On Day 7 of the expansion, cells are transferred to a 6-well Grex plate (Wilson Wolf, Cat #80660M). To each well is added 90 ml of REP media. Subsequently, 10-1000 ng/ml IL-7 and/or 10-1000 ng/ml IL-15 are added, assuming consumption of previously added cytokines.

[0849] On Day 9 of the expansion, a 50% media exchange is performed by removing 50 ml of media and replacing it with 50 ml of fresh REP media. Subsequently, 10-1000 ng/ml IL-7 and/or 10-1000 ng/ml IL-15 are added, assuming consumption of previously added cytokines.

[0850] On day 12 of the expansion, 70 ml of media is removed from the wells. Cells are resuspended in the remaining 30 ml of media and split 1:3 such that 3 independent wells of a 6-well Grex plate are seeded from a single well by transferring 10 ml of cell suspension to the new wells. 90 ml of fresh REP media is added to each well. Subsequently, 10-1000 ng/ml IL-7 and/or 10-1000 ng/ml IL-15 are being added, assuming consumption of previously added cytokines.

[0851] On day 14 of the expansion, cells may be harvested in some cases. In other cases, cells may be further expanded by continued culture in the presence of 10-1000 ng/ml IL-7 and/or 10-1000 ng/ml IL-15 for up to 2 more weeks.

### Example 7: Expansion of TILs Using IL2 in a 1 Step, PBMC Feeder Free Method (K562)

[0852] TILs are expanded directly from single cell suspensions of primary human melanoma metastases. On Day 0 of the culture, single cell suspensions are taken and seeded into the wells of a 24 well Grex plate (Wilson Wolf, Cat #80192M) in a 6 ml volume of TIL media (a 1:1 mixture of RPMI 1640 and AIM V, supplemented with 5% human AB serum) and supplemented with 6000 U/ml recombinant human IL-2. Further added to the wells are artificial antigen presenting cells (aAPC), such as K562 cells, which have been modified to express OS8 (membrane bound OKT3), CD80, CD86, and/or 41BBL. Cells are seeded such that there is a 1 T cells:1 aAPC to a 1 T cell: 25 aAPC ratio.

[0853] On Day 2 of the expansion, 6000 U/ml recombinant human IL-2 are added, assuming consumption of previously added cytokines.

[0854] On Day 5 of the expansion, a 50% media exchange is performed by removing 3 ml of the media from the wells and replacing with 3 ml of fresh REP media. Subsequently, 6000 U/ml recombinant human IL-2 are added, assuming consumption of previously added cytokines.

[0855] On Day 7 of the expansion, cells are transferred to a 6-well Grex plate (Wilson Wolf, Cat #80660M). To each well is added 90 ml of REP media. Subsequently, 6000 U/ml recombinant human IL-2 are added, assuming consumption of previously added cytokines.

[0856] On Day 9 of the expansion, a 50% media exchange is performed by removing 50 ml of media and replacing it with 50 ml of fresh REP media. Subsequently, 6000 U/ml recombinant human IL-2 are added, assuming consumption of previously added cytokines.

[0857] On day 12 of the expansion, 70 ml of media is removed from the wells. Cells are resuspended in the remaining 30 ml of media and split 1:3 such that 3 independent wells of a 6-well Grex plate are seeded from a single well by transferring 10 ml of cell suspension to the new wells. 90 ml of fresh REP media is added to each well. Subsequently, 6000 U/ml recombinant human IL-2 are added, assuming consumption of previously added cytokines. On day 14 of the expansion, cells may be harvested in some cases. In other cases, cells may be further expanded by continued culture in the presence of 6000 U/ml recombinant human IL-2 for up to 2 more weeks.

### Example 8: Robust Rapid Expansion of Peripheral Blood Derived Memory T Cells in an PBMC Feeder Cell-Free Method

[0858] Peripheral blood derived human memory T cells were expanded using artificial antigen presenting cells. Briefly, memory CD4 and CD8 T cells were isolated (from equal numbers of PBMCs) from 3 independent donors using magnetic selection kits (Stemcell technologies, Cat #19157 and #19159), and combined (by donor) to form a pool of pan CD4 and CD8 memory T cells. 500,000 memory T cells per donor (with 2 replicates) were seeded together with either irradiated (15,000 rads) parental K562 cells, OS8- and CD86-expressing K562 artificial antigen presenting cells, or with OS8-, CD86-, and 41BBL-expressing artificial antigen presenting cells in ratios ranging from 1 T cell:10 K562 to 1 T cell: 50 K562 cells in X-VIVO15 (Lonza Cat #04-418Q) media containing 6000 U/ml recombinant human IL-2. As a comparator, 500,000 memory T cells were seeded on irradiated PBMCs (pooled from 5 donors in a 1:1:1:1:1 ratio) at a 1 T cells:100 PBMC ratio, in media containing 6000 U/ml recombinant human IL-2 and 30 ng/ml soluble OKT3. Cells were all seeded into individual wells of a G-rex 6M well plate (Wilson Wolf Cat #80660M) in a 100 ml final volume.

[0859] On day 2 of the culture, IL2 was added to all conditions to 6000 U/ml, assuming consumption the previously added cytokine.

[0860] On day 4 of the culture, 50% of the media was removed, and replaced with fresh media. IL2 was added to a final concentration of 6000 U/ml, assuming consumption of the previously added cytokine.

[0861] On day 7 of the culture, 70% of the media was removed, and the cells were resuspended in the remaining 30 ml. Cells were split 1:3 by taking 10 ml of this cell suspension and transferring to a new well of a G-rex 6M well plate. 90 ml of X-VIVO 15 fresh media was added, and 6000 U/ml recombinant human IL2 was added, assuming consumption of the previously added cytokine.

[0862] On day 9 of the culture, 70% of the media was removed, and the cells were resuspended in the remaining 30 ml. Cells were split 1:6 by taking 5 ml of this cell suspension and transferring to a new well of a G-rex 6M well plate. 95 ml of X-VIVO 15 fresh media was added, and 6000 U/ml recombinant human IL2 was added, assuming consumption of the previously added cytokine.

[0863] On day 12 of the culture, 70% of the media was removed, and the cells were resuspended in the remaining 30 ml. Cells were split 1:3 by taking 10 ml of this cell suspension and transferring to a new well of a G-rex 6M well plate. 90 ml of X-VIVO 15 fresh media was added, and 6000 U/ml recombinant human IL2 was added, assuming consumption of the previously added cytokine.

[0864] On day 14 of the culture, cells were harvested and counted. Cells in PBMC and aAPC conditions demonstrated viabilities greater than 91%. During the 14-day expansion, cells cultured with artificial antigen presenting cells robustly expanded. Memory T cells cultured with K562 cells expressing CD86 and membrane bound anti-CD3, as well as those cultured with K562 cells expressing 41BBL, CD86, and membrane bound anti-CD3 expanded significantly better than those cells cultured with parental K562 cells (FIGS. 5A-5C). Expansion was robustly supported by culture at 1:10 (FIG. 5A), 1:25 (FIG. 5B), and 1:50 (FIG. 5C) responding T cell to K562 ratios. Furthermore, the fold expansion observed approached, and in some cases exceeded, that observed when cells were cultures with irradiated PBMCs+soluble OKT3, which was the REP positive control.

### Example 9: Expansion of TILs Using IL7/IL15 Using Feeder-Free Methods

[0865] TILs are expanded directly from single cell suspensions of primary human melanoma metastases. On Day 0 of the culture, single cell suspensions derived from primary tumor samples are taken and seeded into the wells of a 24 well Grex plate (Wilson Wolf, Cat #80192M) in a 6 ml volume of TIL media (a 1:1 mixture of RPMI 1640 and AIM V, supplemented with 5% human AB serum), and further supplemented with 10-1000 ng/ml IL-7 and/or 10-1000 ng/ml IL-15. To the wells are subsequently added the following:
[0866] TIL Expansion Method A (“Stemcell”)—Anti-CD3/anti-CD2/anti-CD28 tetrameric antibody complex (TAC) from Stemcell Technologies (Cat #10970) are added to the TILs, for a final concentration of 0.01-25 μL/ml.
[0867] TIL Expansion Method B (“Transact”)—A colloidal polymeric nanomatrix covalently attached to humanized recombinant agonists against human CD3 and CD28 from Miltenyi Biotec (MACS GMP T Cell Transact, Cat #130-019-011) is added to the TILs, for a final concentration of 0.01-100 μL/ml.

[0868] For both TIL expansion methods outlined above, a common protocol was followed at discrete time intervals with variations for each method indicated below:

[0869] On Day 2 of the expansion, 10-1000 ng/ml IL-7 and/or 10-1000 ng/ml IL-15 are being added, assuming consumption of previously added cytokines.

[0870] On Day 5 of the expansion, a 50% media exchange is performed by removing 3 ml of the media from the wells and replacing with 3 ml of fresh REP media. Subsequently, 10-1000 ng/ml IL-7 and/or 10-1000 ng/ml IL-15 are added, assuming consumption of previously added cytokines.

[0871] On Day 7 of the expansion, cells are transferred to a 6-well Grex plate (Wilson Wolf, Cat #80660M). To each well is added 90 ml of REP media. Subsequently, 10-1000 ng/ml IL-7 and/or 10-1000 ng/ml IL-15 are being added, assuming consumption of previously added cytokines.

[0872] On Day 9 of the expansion, a 50% media exchange is performed by removing 50 ml of media and replacing it with 50 ml of fresh REP media. Subsequently, 10-1000 ng/ml IL-7 and/or 10-1000 ng/ml IL-15 are being added, assuming consumption of previously added cytokines.

[0873] On day 12 of the expansion, 70 ml of media is removed from the wells. Cells are resuspended in the remaining 30 ml of media and split 1:3 such that 3 independent wells of a 6-well Grex plate are seeded from a single well by transferring 10 ml of cell suspension to the new wells. 90 ml of fresh REP media is added to each well. Subsequently, 10-1000 ng/ml IL-7 and/or 10-1000 ng/ml IL-15 are added, assuming consumption of previously added cytokines.

[0874] On day 14 of the expansion, cells may be harvested in some cases. In other cases, cells may be further expanded by continued culture in the presence of 10-1000 ng/ml IL-7 and/or 10-1000 ng/ml IL-15 for up to 2 more weeks.

### Example 10: Transcriptional Analysis of TILs

[0875] The cellular composition of TILs after the TIL expansion processes shown above was assessed by the NanoString nCounter CAR-T Characterization Panel. An aliquot of cells from 5 donors expanded either by “conventional process” or “IL-15 Process”, as described in Example 1, were pelleted and frozen prior to RNA isolation. One aliquot was made for OR1A1-edited TILs and one for SOCS1-edited TILs. For one donor, a technical replicate was made to assess concordance between the two samples for quality control. RNA isolation was performed using the Arcturis PicoPure RNA Isolation Kit with on-column DNase treatment. Normalized RNA was then used for mRNA:probe hybridization in an nCounter system. Raw counts were normalized, grouped, and analyzed for pathway enrichment using nSolver Analysis Software 4.0.

[0876] TILs that were OR1A1-edited and then cultured in IL-15 had significantly lower expression of T-cell exhaustion markers than their IL-2-cultured counterparts (8+1% decrease in score, p=0.002; FIG. 6). Exhaustion and cytotoxicity scores were calculated using NanoString nSolver software according to the teachings of Tomfohr J, Lu J, Kepler T B, Pathway level analysis of gene expression using singular value decomposition, BMC Bioinformatics. 2005; 6:225. The exhaustion score is composed of pre-annotated genes whose expression are indicators of an exhausted state, for example PTGER2, FASLG, TNFRSF9, IRF4, CTLA4, EOMES, PDPN, LAG3, TNFSF9, CD86, TIGIT, HAVCR2, CASP3, PROCR, MDFIC, CCL3, CD160, BATF, TOX, CD244, B3GAT1, KLRG1, LILRB4 and PDCD1 among others. Consistent with a less-activated state, these IL-15-expanded TILs were depleted in pre-annotated genes that compose the cytotoxicity score (120+30% decrease, p=0.001; FIG. 7), including PTGER2, FASLG, TNFRSF9, IRF4, CTLA4, EOMES, PDPN, LAG3, TNFSF9, CD86, TIGIT, HAVCR2, CASP3, PROCR, MDFIC, CCL3, CD160, BATF, TOX, CD244, B3GAT1, KLRG1, LILRB4 and PDCD1. When SOCS1-edited TILs cultured in IL-15 were compared to OR1A1-edited TILs in IL-2, a 4.6+0.8% decrease in Exhaustion score was noted (p=0.003), however no significant drop in cytotoxicity score was observed (p>0.05). SOCS1-editing therefore reversed the negative impact of IL-15 on cytotoxicity score (FIG. 7) while still reducing T cell exhaustion score (FIG. 6), possibly through the activation of IFNG and Type II Interferon signaling (FIG. 8). Values represent mean+SEM and statistical significance was assessed by one-way ANOVA with Dunnetts multiple comparisons tests (*p<0.05).

### Example 11: Methods for Expanding Pre-REP Failure TILs with Soluble Activators or Artificial Antigen Presenting Cells (aAPCs)

[0877] Tumor infiltrating lymphocytes (TILs) were expanded directly from single cell suspensions of primary human melanoma metastases. TILs were obtained from three different donors: Donor 3239, Donor 6752, and Donor 6755. Donor 6752 and Donor 6755 were previously identified as pre-REP failures, unable to expand to 4×10⁷ cells in 23 days in a pre-REP. On Day 0 of the culture, 400,000-800,000 live cells from single cell suspensions were taken and seeded into the wells of a 24 well Grex plate (Wilson Wolf, Cat #80192M) in a 6 ml volume of TIL media (a 1:1 mixture of RPMI 1640 and AIM V, supplemented with 5% human AB serum) and supplemented with 6,000 U/ml of recombinant human IL-2 (Peprotech, Cat #200-02) or 1000 ng/ml IL-15 (Peprotech, Cat #200-15). The viable cells seeded per condition contained 22K to 52K CD3+ T cells as determined by flow cytometry. Cells were activated and expanded using five different methods, as described below:
[0878] TIL Expansion Method 1 (“REP-like”)—One-step Rapid Expansion Protocol without pre-REP. Feeder cells (PBMCs) from five healthy donors were irradiated (6,000 rads) and pooled in a 1:1:1:1:1 ratio. 1×10⁷ irradiated PBMCs were added to each well, as well as 360 ng of OKT3 (Biolegend, Cat #317326) for a final concentration of 60 ng/ml.
[0879] TIL Expansion Method 3 (“Stemcell”)—Tetrameric Antibody Complexes (TAC) from Stemcell. 37.5 μl of anti-CD3/anti-CD2/anti-CD28 tetrameric antibody complex (TAC) from Stemcell Technologies (Cat #10970) was added to the TILs, for a final concentration of 6.25 l/ml.
[0880] TIL Expansion Method 4 (“Transact”)—Nanomatrix from Miltenyi Biotec. 85 μl of a colloidal polymeric nanomatrix covalently attached to humanized recombinant agonists against human CD3 and CD28 from Miltenyi Biotec (MACS GMP T Cell Transact, Cat #170-076-156) was added to the TILs, for a final dilution of 70:1.
[0881] TIL Expansion Method 5 (“aAPC-OKT3”)—K562 cells engineered to express OKT3 were irradiated (15,000 rads). 1×10⁶ irradiated aAPC-OKT3 cells were added to each well for a final cell to area ratio of 5×10⁵ cells/cm².
[0882] TIL Expansion Method 6 (“aAPC-OKT3-CD86”)—K562 cells engineered to express OKT3 and CD86 were irradiated (15,000 rads). 1×10⁶ irradiated aAPC-OKT3 cells were added to each well for a final cell to area ratio of 5×10⁵ cells/cm².

[0883] For all five TIL expansion methods outlined above, a common protocol was followed at discrete time intervals with variations for each method indicated below:
[0884] Day 2: 36,000 U of recombinant human IL-2 was added to each well, for a final concentration of 6,000 U/ml, assuming consumption to the corresponding wells. IL-15 was added at a final concentration of 1000 ng/ml to the corresponding wells assuming consumption.
[0885] Day 4 and Day 6: 50% media was replaced/exchanged. From each well, 3 ml of cell supernatant was removed and discarded, being careful not to disturb the cells at the bottom of the well. Subsequently, 3 ml of fresh TIL media and 36,000 U of IL-2 was then added, for a final concentration of 6,000 U/ml, assuming consumption. IL-15 was added at a final concentration of 1000 ng/ml to the corresponding wells assuming consumption.
[0886] Day 7: For all conditions, cells were counted. The entire volume (6 ml) was transferred to a 6 well Grex (Wilson Wolf) containing 100 ml TIL media with either 6000 U/ml IL-2 or 1000 ng/ml IL-15.
[0887] Day 10 or Day 11: On Day 10 and Day 11, all aAPC samples and soluble activator samples were engineered using CRISPR-Cas9 as described in Example 4 respectively. Following electroporation, 2×10⁵ cells were transferred to a 24 well Grex (Wilson Wolf) in 6 ml TIL media containing 6000 U/ml of IL-2 or 1000 ng/ml of IL-15.
[0888] Day 13: 36,000 U of recombinant human IL-2 was added to each well, for a final concentration of 6,000 U/ml, assuming consumption to the corresponding wells. IL-15 was added at a final concentration of 1000 ng/ml to the corresponding wells assuming consumption.
[0889] Day 15: 50% media was replaced/exchanged. From each well, 50 ml of cell supernatant was removed and discarded, being careful not to disturb the cells at the bottom of the well. Subsequently, 50 ml of fresh TIL media and 36,000 U of IL-2 was then added, for a final concentration of 6,000 U/ml, assuming consumption. IL-15 was added at a final concentration of 1000 ng/ml to the corresponding wells assuming consumption.
[0890] Day 18: Donor 3339 samples were harvested. Donor 6755 samples were harvested, samples olfactory (O), SOCS1 (S), and SOCS1+PTPN2 (S+P2) activated with aAPC-OKT3 or aAPC-OKT3-CD86 in IL-2 and IL-15 underwent a 50% media exchange as described on day 15. Donor 6752 samples underwent a 50% media exchange as described on day 15.
[0891] Day 21: Remaining Donor 6755 samples and Donor 6752 samples underwent a 50% media exchange as described on day 15.
[0892] Day 23: Remaining Donor 6755 samples and Donor 6752 samples were harvested.

### Example 12: Methods to Genetically Engineer Pre-REP Failure TILs with Soluble Activators or aAPCs Using CRISPR-Cas9

[0893] TILs expanded using the protocols described in Example 11 were genetically engineered using CRISPR-Cas9 to create functional genetic knockouts of a target gene. This genetic engineering was performed on day 10 of each method described in Example 11, and also on other days, ranging from day 0-21. Briefly, on day 10, 1.2×10⁶ expanded TILs were centrifuged at 300×g for 5 minutes and resuspended with 20 μl of MaxCyte electroporation buffer (HyClone Cat #EPB1). Several ribonucleoprotein (RNP) master mixes were made containing 52 pmol Cas9 protein (Aldevron, Cat #9212) and 120 pmol of each individual sgRNA. Master mix 1 contained the sgRNA for the OR1A2 gene (O) (IDT, AGATGATGTCAACCAAGGAG SEQ ID NO: 913). Master mix 2 contained the sgRNA for the SOCS1 gene (S) (IDT, GACGCCTGCGGATTCTACTG SEQ ID NO: 61). Master mix 3 contained sgRNAs for the SOCS1 gene (SEQ ID NO: 61) and PTPN2 gene (IDT, GGAAACTTGGCCACTCTATG SEQ ID NO: 206) (S+P2). 100 μM solution of OR1A2 sgRNA was made by resuspending 10 nmol lyophilized sgRNA with 100 μl Nuclease Free Duplex Buffer (IDT Cat #1072570). Reagents were added as follows:

| | Vol (μL) |
|---|---|
| sgRNA (100 μM) | 1.2 |
| Cas9 (61 μM) | 0.84 |
| DPBS (1X) | 1.76 |

[0894] The entire 5 μl of the RNP master mix was added to the 20 μl cell suspension. 25 l of cell suspension was then transferred to an OC25×3 processing assembly (MaxCyte, Cat #OC-25×3). Cells were electroporated on a MaxCyte ExPERT electroporator using the “Optimization #9” program. Subsequently, 25 μl TIL were transferred to a 96-well plate, each chamber was washed with 25 μL TIL media twice and transferred to the 96-well recovery plate, which was then incubated at 37° C. for 20 minutes. Subsequently, cells were counted, and 2×10⁵ live cells were then seeded into a 24 well Grex plate containing 6 ml TIL media supplemented with 6,000 U/ml IL-2 or 1000 ng/ml IL-15. Further cell manipulations were conducted beginning on day 13 as described in Example 11. On days 18 and 23, cells were harvested and counted. Cell pellets were frozen, and editing was determined by amplicon sequencing (FIG. 12).

### Example 13: Phenotypic Characterization of Pre-REP Failure TILs with Soluble Activators or aAPCs

[0895] The phenotype of T cells produced on day 18 or 23 was assessed. In particular, the proportion of cells that were defined as central memory T cell phenotype (Tem, with marker phenotype CD45RO+ CCR7+ CD45RA−) was determined by flow cytometry. Cells cultured as in Example 11 were taken, and on day 18 or 23 an aliquot of cells was stained with fluorescently labeled antibodies that detect CD45RO, CCR7, and CD45RA. Compared to pre-RNP (cells prior to electroporation) Method 3 (Stemcell) and Method 4 (Transact) generated similar percentages of Tem cells on day 18 or 23 (FIG. 11). The percentage of CD8+ T cells showed a general enrichment as compared to pre-RNP cells for all methods at day 18 or 23 (data not shown).

[0896] The fold expansion (FIG. 9) of TILs at day 10 or 11 (relative to the number of cells on Day 0) prior to electroporation was assessed for TILs expanded by the addition of IL-2 or IL-15 for the five methods described in Example 11. All donors, including the two pre-REP failures showed expansions greater than 2600-fold in methods 1, 3, 4, 5, and 6. SOCS1 edited TILs showed greater mean fold expansion than olfactory and SOCS1+PTPN2 edited TILs across all methods on days 18 or 23 (FIG. 10). Method 6 showed greater mean fold expansion of SOCS1 edited TIL as compared to Method 5 on day 18 or 23.

### Example 14: Methods for Expanding TILs from a Tumor Fragment Using a Soluble Activator

[0897] Tumor infiltrating lymphocytes (TILs) were expanded directly from frozen melanoma tumor fragments from primary patients. Tumor fragments were obtained from 2 donors: Donor D4462 and Donor D7283. On Day 0, tumor fragments were thawed and placed in a 10 cm² dish containing TIL media (a 1:1 mixture of RPMI 1640 and AIM V, supplemented with 5% human AB serum). Fragments were weighed and then evenly split (by number of fragments) into two aliquots and each aliquot was placed in a well of a 24 well Grex plate (Wilson Wolf, Cat #80192M). 6 mL of TIL media was added to each well containing a 1:70 dilution of GMP TransAct reagent (MACS GMP T Cell Transact, Cat #170-076-156) in either 6000 U/mL IL-2 (Peprotech, Cat #200-02) or 1000 ng/mL IL-15 (Peprotech, Cat #200-15). Cells were cultured at 37° C.

[0898] On Day 2 of the expansion, 36,000 U of recombinant human IL-2 was added to each well, for a final concentration of 6,000 U/ml, assuming consumption to the corresponding wells. IL-15 was added at a final concentration of 1,000 ng/mL to the corresponding wells assuming consumption.

[0899] On Day 6 of the expansion, for D7283 a 50% media was replaced/exchanged. From each well, 3 mL of cell supernatant was removed and discarded, being careful not to disturb the cells at the bottom of the well. Subsequently, 3 mL of fresh TIL media and 36,000 U of IL-2 was then added to a final concentration of 6,000 U/ml to the corresponding wells assuming consumption. IL-15 was added to a final concentration of 1,000 ng/mL to the corresponding wells assuming consumption. For D4462, samples were engineered using CRISPR-Cas9 as described in Example 15. Following electroporation, 4×10⁵ cells were transferred to a 24 well Grex (Wilson Wolf) in 6 mL TIL media containing 6,000 U/mL of IL-2 or 1,000 ng/mL of IL-15.

[0900] On Day 9 of the expansion, a 50% media was replaced/exchanged. From each well, 3 mL of cell supernatant was removed and discarded, being careful not to disturb the cells at the bottom of the well. Subsequently, 3 mL of fresh TIL media and 36,000 U of IL-2 was then added, for a final concentration of 6,000 U/ml, assuming consumption. IL-15 was added at a final concentration of 1,000 ng/mL to the corresponding wells assuming consumption.

[0901] On Day 10 of the expansion, for D4462, 3 mL of media was aspirated from each well of a 24 well Grex. The remaining 3 mL was added to a 6 well Grex (Wilson Wolf) containing 100 mL TIL media with 6,000 U/mL IL-2 or 1,000 ng/mL IL-15. For D7283, samples were engineered using CRISPR-Cas9 as described in Example 15. Following electroporation, 4×10⁵ cells were transferred to a 24 well Grex (Wilson Wolf) in 6 mL TIL media containing 6,000 U/mL of IL-2 or 1,000 ng/mL of IL-15.

[0902] On Day 14 of the expansion, D4462 wells were harvested. D7283, 3 mL of media was aspirated from each well of a 24 well Grex. The remaining 3 mL was added to a 6 well Grex (Wilson Wolf) containing 100 mL TIL media with 6,000 U/mL of IL-2 or 1,000 ng/mL of IL-15.

[0903] On Day 17 of the expansion, D7283, 50 mL TIL media was removed and replaced with 50 mL fresh TIL media. 6,000 U/mL of IL-2 or 1,000 ng/mL of IL-15 was added to consumption.

[0904] On Day 20 of the expansion, D7283 wells were harvested.

### Example 15: Methods to Genetically Engineer Fragment Expanded TILs with Soluble Activators Using CRISPR-Cas9

[0905] TILs expanded using the protocols described in Example 14 were genetically engineered using CRISPR-Cas9 to create functional genetic knockouts of a target gene. This genetic engineering was performed on day 6 or day 10. Briefly, on day 6 or 10, 1.2×10⁶ expanded TILs were centrifuged at 300×g for 5 minutes and resuspended with 20 μl of MaxCyte electroporation buffer (HyClone Cat #EPB1). Two ribonucleoprotein (RNP) master mixes were made containing 52 pmol Cas9 protein (Aldevron, Cat #9212) and 120 pmol of each individual sgRNA. Master mix 1 contained the sgRNA for the OR1A2 gene (O) (IDT, AGATGATGTCAACCAAGGAG SEQ ID NO: 913). Master mix 2 contained the sgRNA for the SOCS1 gene (S) (IDT, GACGCCTGCGGATTCTACTG SEQ ID NO: 61). 100 μM solution of OR1A2 sgRNA was made by resuspending 10 nmol lyophilized sgRNA with 100 μL Nuclease Free Duplex Buffer (IDT Cat #1072570). Reagents were added as follows:

| | Vol (μL) |
|---|---|
| sgRNA (100 μM) | 1.2 |
| Cas9 (61 μM) | 0.84 |
| DPBS (1X) | 1.76 |

[0906] The entire 5 μL of the RNP master mix was added to the 20 μL cell suspension. L of cell suspension was then transferred to an OC25×3 processing assembly (MaxCyte, Cat #OC-25×3). Cells were electroporated on a MaxCyte ExPERT electroporator using the “Optimization #9” program. Subsequently, 25 μL TIL were transferred to a 96-well plate, each chamber was washed with 25 μL TIL media twice and transferred to the 96-well recovery plate, which was then incubated at 37° C. for 20 minutes. Subsequently, cells were counted, and 4×10⁵ live cells were then seeded into a 24 well Grex plate containing 6 mL TIL media supplemented with 6,000 U/ml of IL-2 or 1000 ng/mL of IL-15. Further cell manipulations were conducted as described in Example 14. On days 14 and 20, cells were harvested and counted. Cell pellets were frozen, and editing was determined by NGS sequencing (FIG. 15).

### Example 16: Phenotypic Characterization of Tumor Fragment Expanded TILs with Soluble Activators or aAPCs

[0907] The phenotype of T cells produced on day 14 or 20 was assessed. In particular, the proportion of cells that were defined as central memory T cell phenotype (Tcm, with marker phenotype CD45RO+ CCR7+ CD45RA−) or effector memory T cell phenotype (Teff, with marker phenotype CD45RO+ CCR7− CD45RA−) was determined by flow cytometry. Cells cultured as in Example 14 were taken, and on day 14 or 20 an aliquot of cells was stained with fluorescently labeled antibodies that detect CD45RO, CCR7, and CD45RA. All conditions tested showed predominantly a Teff memory phenotype. SOCS1 editing modestly increased Tcm phenotype (FIG. 14).

[0908] The theoretical TIL cell numbers generated by the soluble activator tumor fragment expansion methods at day 14 or 20 was assessed for TILs expanded by the addition of IL-2 or IL-15. Theoretical cell counts were calculated assuming a one-gram tumor fragment sample. All conditions tested showed mean expansions greater than 1×10¹⁰ TIL after 20 days (FIG. 13).

### Example 17: Frozen Tumor Digest TIL Expansion and Frozen Tumor Fragment TIL Expansion

[0909] Frozen tumor digest TIL expansion was compared to frozen tumor fragment TIL expansion in the presence of IL-2 or IL-15 utilizing the TransACT activator. Following activation, editing for olfactory (O) and SOCS1 (S) was performed and compared to a no electroporation (no EP) control.

[0910] The materials used for this assessment were the following:

| | | |
|---|---|---|
| Human IL-2 (Lot 031912-1) | Peprotech | 200-02 |
| Human IL-15 (Lot 091924) | Peprotech | 200-15 |
| GMP T Cell TransAct (Lot 5200103426) | MACS | 170-076-156 |
| sNLS-SpCas9-sNLS Nuclease (Lot MPM030-04) | Aldevron | 9212-5MG |
| sg_Nh.SOCS1_u728 (custom A. Hohmann) | Bio spring | 28May19 |
| sgOR1A2_axfc | IDT | 145243571. |
| Electroporation Buffer (Lot AD22541263, PD | Hyclone | EPB1 |
| 10/2018) | | |
| OC25x3 Processing Assembly (Lot LM236738) | MaxCyte | #OC-25x3 |
| Grex 24 well plate | Wilson Wolf | 80192M |
| Grex 6 well plate | Wilson Wolf | 80660M |
| AccuCheck Counting Beads | Life Technologies | PCB100 |
| Cryostor CS10 | Stemcell Inc | 07930 |
| RPMI1640 IX L-Glutamine | Gibco | 11875-093 |
| AIM-V Medium 1X. | Gibco | 12055-091 |
| Human AB Serum-Sterile Filtered Heat Inactivated | Valley Biomedical | HP1022HI |

*Complete media: 50/50 RPMI/AIM-V, 5% human serum

[0911] Melanoma digests were received from Conversant Bio and melanoma tumor fragments were received from iSpecimen. The donor information and references were the following:
[0912] D3239 (Digest)
[0913] D6138 (Digest)
[0914] D6755 (Digest)
[0915] D4462 (Fragment) Melanoma
[0916] D7283 (Fragment) Melanoma

[0917] For both TIL expansions, a common protocol was followed at discrete time intervals as indicated below:

[0918] At Day 0 of the expansion, cells were thawed according to Discovery Life Sciences Protocol (Thawing Viable Cell Products-1.pdf) using three vials per donor. Each TIL donor tube were resuspended in 1 mL complete media and combined for a total of 3 mL. The cells were counted using the Nexelcom Cellometer as per manufacturer's recommendations. 200 μL was removed from each donor for FACS staining. WI-002 ACT FACS Differentiation Panel.docx work instruction was followed for the staining. At the final resuspension step, 100 uL of an Accucheck beads solution was added (stock concentration 200,000 beads/mL) to obtain a total of 20,000 beads. The total number of T cells was calculated based upon acquired beads. Afterward, a TransAct reagent from a 2× working solution (1:35) was prepared to a final concentration of 1:70. 2×10⁶ cells and 3 mL of the 2× TransAct reagent were added to a well in a 24 well Grex, and the remaining TIL media was added to the cell to bring the total volume to 6 mL. IL-2 was added at a final concentration of 6,000 U/mL to the corresponding wells. IL-15 was added to a final concentration of 1,000 ng/mL to the corresponding wells. The cells were incubated at 37° C.

[0919] Still at Day 0 of the expansion, the tumor fragment vials were thawed in a 37° C. water bath. The fragments were then poured into a 10 cm² dish containing 10 mL TIL media. The 10 cm² dish was placed on a measuring pad and the fragments were photographed. The fragments were split into two equal aliquots and each aliquot was placed into a 1.5 mL Eppendorf tube containing 1 mL TIL media. The fragments were spun down at 200 g for 5 minutes. The media was aspirated, and the pooled fragments were weighted. 3 mL of the 2× TransACT reagent and 3 mL of the TIL media were added to wells of a 24 well Grex. Fragments were added to the wells of a 24 well Grex. For D4462, 8 fragments were combined with IL-2 and 8 fragments were combined with IL-15. For D7283, 6 fragments were combined with IL-2 and 6 fragments were combined with IL-15. IL-2 was added at 6,000 U/mL or IL-15 was added at 1,000 ng/mL to the corresponding wells. The cells were incubated at 37° C.

[0920] At Day 2 of the expansion, IL-2 or IL-15 was added to all donors. IL-2 was added to consumption to 6,000 U/mL or IL-15 was added to consumption to 1,000 ng/mL in the corresponding wells.

[0921] At Day 4 of the expansion, media for all donors were exchanged. 3 mL of media from each well was discarded and 3 mL of TIL media was added to each well. Afterward, IL-2 was added to a final concentration of 6,000 U/mL or IL-15 was added to a final concentration of 1,000 ng/mL in the corresponding wells.

[0922] At Day 6 of the expansion, the D3239, D6138, D6755, and D4462 were FACS stained and electroporated. The concentration of olfactory sgRNA was adjusted to 100 μM by resuspending 10 nmol vial with 100 uL duplex buffer. The SOCS1 guide was already at the necessary concentration. A RNP solution for a total of 15 tests was prepared with the volumes below:

| | Vol/test (μL) |
|---|---|
| sgRNA (100 μM) | 1.2 |
| Cas9 (61 μM) | 0.84 |
| DPBS (1X) | 2.96 |
| RNP solution | 5 |
| Maxcyte sol (cells) | 20 |

The MaxCyte instrument was prepared and set to “optimization #9” OC25×3. 3 mL of media was aspirated from each well, the volume was recorded, and the cells were counted. 100 uL of pre-electroporated cells was transferred to a 96 well v-bottom plate and stained according to WI-002 ACT FACS Differentiation Panel.docx protocol. 1.2×10⁶ cells were added to a 1.5 mL Eppendorf tube for each condition. Tubes were spun down at 300 g for 5 minutes and the supernatant was removed. 20 uL of MaxCyte electroporation buffer was added to 1.5 mL Eppendorf tube. 5 uL of the Olfactory or SOCS1 RNP solution was added to the corresponding Eppendorf tube. Up to 25 μL was transferred to the OC25×3 assembly and the cells were electroporated. 25 μL of cells were transferred from a well from the OC25×3 to a 96 well recovery plate. The OC25×3 well was rinsed with 25 μL of TIL media two times for a final volume of 75 μL in the recovery plate well. The cells were incubated for 20 minutes at 37° C. The cells were counted by: adding 5 μL from the recovery plate to 45 μL TIL media in a counting well (10-fold dilution); adding 50 μL of AOPI and mixing; transferring to counting chamber; and counting the cells. 4×10⁵ cells were then transferred to a well of a 24 well Grex. The well was incubated at 37° C.

[0923] At Day 9 of the expansion, the media for all donors were exchanged. 3 mL of media was discarded from each well. 3 mL of TIL media was added to each well, and IL-2 was added to a final concentration of 6,000 U/mL or IL-15 was added to a final concentration of 1,000 ng/mL in the corresponding wells.

[0924] At Day 10 of the expansion, the D7283 was FACS stained and electroporated. Samples were prepared as stated for the samples at Day 6. Enough was prepared for 5 samples.

[0925] Still at Day 10 of the expansion, samples D3239, D6138, D6755, and D4462 were transferred to a 6 well Grex. 100 mL of TIL media was added to a 6 well Grex containing 6,000 U/mL of IL-2 or 1,000 ng/mL of IL-15. 3 mL of media from each donor well was discarded. Cells were counted and the volume recorded. 3 mL of donor cells was added to the corresponding well in a 6 well Grex containing 100 mL TIL media with cytokine.

[0926] At Day 14 of the expansion, takedown assays were performed for D3239, D6183, D6755, and D4462. 80 mL was aspirated from each well of the 6 well Grex, mixed, and their volume recorded. One vial was saved for NGS processing: 1 million of cells were transferred to a 1.5 mL Eppendorf tube, and the tube was spun down at 300 g for 5 minutes. Supernatant was aspirated and the cells stored at −80° C. FACS analysis was preformed: 1 million cells per condition were transferred to a v-bottom or u-bottom 96 well plate for the differentiation and polyfunctional panel respectively. Cells were processed according to work instructions “WI-002 ACT FACS Differentiation Panel.docx” and “WI-008 ACT FACS Polyfunctional Panel CD25 APC.docx.” The remaining cells were frozen: 50 million cell pellets were prepared; the cells were spun at 300 g for 5 minutes; the supernatant was aspirated; cryostore was added; the cells were resuspended to 50 million cells/mL; 1 mL was added to cryovial and placed in a coozie at −80° C. overnight before transfer to LN2.

[0927] At Day 14 of the expansion, the D7283 was transferred to a 6 well Grex. 100 mL of TIL media was added to a 6 well Grex containing 6,000 U/mL of IL-2 or 1,000 ng/mL of IL-15. 3 mL of media was discarded from each donor well. The cells were counted, and the volume was recorded. 3 mL of donor cells was added to the corresponding well in a 6 well Grex containing 100 mL TIL media with cytokine.

[0928] At Day 17 of the expansion, the cells from the sample D7283 were counted and a 50% media exchange was performed. 50 mL media was removed, and the cells were counted. 50 mL of TIL media was added for a total of 100 mL. IL-2 to 6,000 U/mL was added and IL-15 to 1,000 ng/mL was added assuming consumption.

[0929] At Day 20 of the expansion, takedown assays were performed for D7283 and the expansion was continued. 70 mL from each well of the 6 well Grex was aspirated, mixed and their volume recorded. 5 million cells were removed to support takedown assays below. One vial for NGS processing was saved: 1 million of cells were transferred to a 1.5 mL Eppendorf tube and spun down at 300 g for 5 minutes; the supernatant was aspirated; and the was stored at −80° C. The editing efficiencies from Day 14 harvest are depicted in FIG. 16 The FACS analysis was performed: 1 million of cells per condition were transferred to a v-bottom 96 well plate for the differentiation; and cells were processed according to work instruction “WI-002 ACT FACS Differentiation Panel.docx.” The remaining cells were frozen: 50 million cell pellets were prepared; the cells were spun at 300 g for 5 minutes; the supernatant was aspirated; cryostore was added and the cells were resuspended to 50 million cells/mL; and 1 mL was added to cryovial and placed in a coozie at −80° C. overnight before being transferred to LN2. 70 mL TIL media was added to wells for a total of 100 mL. IL-2 to 6,000 U/mL was added and IL-15 to 1,000 ng/mL was added assuming consumption.

[0930] At Day 23 of the expansion, takedown assays were performed for D7283 and the sample was frozen down. 70 mL was aspirated from each well of the 6 well Grex, mixed, and their volume recorded. 1 million cells were removed to support takedown assays below. The FACS analysis was performed: 1 million cells per condition were transferred to a u-bottom 96 well plate for the polyfunctional pane; and cells were processed according to work instruction “WI-008 ACT FACS Polyfunctional Panel CD25 APC.docx.” The remaining cells were frozen: 50 million cell pellets were prepared; the cells were spun at 300 g for 5 minutes; the supernatant was aspirated; Cryostore was added and cells were resuspended to 50 million cells/mL. 1 mL was added to cryovial and placed in a coozie at −80° C. overnight before being transfer to LN2. TILs were determined to be highly viable (FIG. 17), with extrapolated TIL yields exceeding 1×10⁹ cells for both fragment and digest samples (FIG. 18) by Day 14 of the process.

### Example 18: Methods for Expanding TILs from a Tumor Fragment Using a Soluble Activator

[0931] Tumor infiltrating lymphocytes (TILs) were expanded directly from frozen melanoma tumor fragments from primary patients. Tumor fragments were obtained from 2 donors: Donor D4008 and Donor D4375. On Day 0, tumor fragments were thawed and placed in a 10 cm² dish containing TIL media (a 1:1 mixture of RPMI 1640 and AIM V, supplemented with 5% human AB serum). Fragments were weighed and then evenly split (by number of fragments) into two aliquots and each aliquot was placed in a well of a 24 well Grex plate (Wilson Wolf, Cat #80192M). 6 mL of TIL media was added to each well containing a 1:70 dilution of GMP TransAct reagent (MACS GMP T Cell Transact, Cat #170-076-156) in either 6000 U/mL IL-2 (Peprotech, Cat #200-02) or 1000 ng/mL IL-15 (Peprotech, Cat #200-15). Cells were cultured at 37° C.

[0932] On Day 2 of the expansion, 36,000 U of recombinant human IL-2 was added to each well for a final concentration of 6,000 U/ml, assuming consumption to the corresponding wells. IL-15 was added at a final concentration of 1,000 ng/mL to the corresponding wells assuming consumption.

[0933] On Day 4 of the expansion, a 50% media was replaced/exchanged. From each well, 3 mL of cell supernatant was removed and discarded, being careful not to disturb the cells at the bottom of the well. Subsequently, 3 mL of fresh TIL media containing 6,000 U/ml IL-2 was then added to the corresponding wells. 3 mL of fresh TIL media containing 1000 ng/ml IL-15 was then added to the corresponding wells.

[0934] On Day 6 of the expansion, cells were resuspended using spent media in each well and counted. 36,000 U of recombinant human IL-2 was added to each well for a final concentration of 6,000 U/ml, assuming consumption to the corresponding wells. IL-15 was added at a final concentration of 1,000 ng/mL to the corresponding wells assuming consumption.

[0935] On Day 7 of the expansion, cells were resuspended using spent media in each well, counted and evenly split into two wells, ˜3 mL per well. Subsequently, 3 mL of fresh TIL media containing 6,000 U/ml IL-2 was then added to the corresponding wells. 3 mL of fresh TIL media containing 1000 ng/ml IL-15 was then added to the corresponding wells.

[0936] On Day 9 of the expansion, cells were resuspended using spent media in each well and evenly split into two wells, ˜3 mL per well. Subsequently, 3 mL of fresh TIL media containing 6,000 U/ml IL-2 was then added to the corresponding wells. 3 mL of fresh TIL media containing 1000 ng/ml IL-15 was then added to the corresponding wells.

[0937] On Day 10 of the expansion, same condition from each well was combined, filtered by cell strainer and counted; pre-electroporation cell number and viability is shown in FIG. 20. 3×10⁶ cells from donor 4008 and 6×10⁶ cells from donor 4375 were transferred to a 6 well Grex (Wilson Wolf Cat #80660M) in 50 mL TIL media without any cytokine (an oversight). The remaining samples were engineered using CRISPR-Cas9 as described in Example 19. Following electroporation, all cells from donor 4008 (3.9×10⁶˜5.5×10⁶) were transferred to a 6 well Grex in 50 mL TIL media containing 6,000 U/mL of IL-2 or 1,000 ng/mL of IL-15. Following electroporation, 8.6×10⁶ cells from donor 4375 were transferred to a 6 well Grex in 50 mL TIL media containing 6,000 U/mL of IL-2 or 1,000 ng/mL of IL-15.

[0938] On Day 13 of the expansion, all conditions (IL2 or IL15, No EP or edited TILs) from donor 4008 were discarded due to culture contamination. For donor 4375, 300,000 U of recombinant human IL-2 was added to each well for a final concentration of 6,000 U/ml, assuming consumption to the corresponding wells. IL-15 was added at a final concentration of 1,000 ng/mL to the corresponding wells assuming consumption.

[0939] On Day 15 of the expansion, 30 mL of supernatant was removed; cells were resuspended using spent media and counted. All no EP cells (16×10⁶˜35×10⁶) and 30×10⁶ of all edited cells were re-plated to a 6 well Grex (Wilson Wolf). Fresh TIL media was added to each well to 100 mL. 6,000 U/mL of IL-2 or 1,000 ng/mL of IL-15 was added to consumption.

[0940] On Day 17 of the expansion, all the wells were harvested. Post-electroporation cell number and viability is shown in FIG. 21. Together, these data demonstrate that IL-15 unexpectedly supports the viable manufacture of CRISPR/Cas9 engineered TIL, including the manufacture of viable dual CRISPR/Cas9 engineered TIL.

### Example 19: Methods to Genetically Engineer Fragment Expanded TILs with Soluble Activators Using CRISPR-Cas9

[0941] TILs expanded using the protocols described in Example 18 were genetically engineered using CRISPR-Cas9 to create functional genetic knockouts of a target gene, a streamlined protocol is depicted in FIG. 19. This genetic engineering was performed on day 10. Briefly, for donor 4008 on day 10, 18×10⁶ expanded from either IL-2 or IL-15 cultured TILs were centrifuged at 300×g for 7 minutes and resuspended with 320 μl of MaxCyte electroporation buffer (HyClone Cat #EPB1); for donor 4375 on day 10, 36×10⁶ expanded from either IL-2 or IL-15 cultured TILs were centrifuged at 300×g for 7 minutes and resuspended with 480 μl of MaxCyte electroporation buffer. Cell suspension from each donor was evenly split into two aliquots to account for two edit conditions. Eleven ribonucleoprotein (RNP) master mixes were made containing 2281 pmol Cas9 protein (Aldevron, Cat #9212) and 5280 pmol of each individual sgRNA. Master Mix 1 contained the sgRNA for the SOCS1 gene (Biospring, GACGCCTGCGGATTCTACTG SEQ ID NO: 61) and ZC3H12A gene (IDT, AGGCACCACTCACCTGTGAT SEQ ID NO: 377 Master Mix 2 contained the sgRNA for the SOCS1 gene (IDT, GACGCCTGCGGATTCTACTG SEQ ID NO: 61). 100 μM solution of ZC3H12A sgRNA was made by resuspending 10 nmol lyophilized sgRNA with 100 μL Nuclease Free Duplex Buffer (IDT Cat #1072570). Reagents were added as follows:

| Master Mix 1 | Vol (μL) |
|---|---|
| SOCS-1 sgRNA (100 μM) | 52.8 |
| ZC3H12A sgRNA (100 μM) | 52.8 |
| Cas9 (61 μM) | 37.4 |
| DPBS (1X) | 77.0 |

| Master Mix 2 | Vol (μL) |
|---|---|
| SOCS-1 sgRNA (100 μM) | 52.8 |
| Cas9 (61 μM) | 37.4 |
| DPBS (1X) | 129.8 |

[0942] For donor 4008, 40 μL of the RNP master mix was added to the 160 μL cell suspension. For donor 4375, 60 μL of the RNP master mix was added to the 240 μL cell suspension. 100 μL/well of cell suspension was then transferred to an OC100×2 processing assembly (MaxCyte, Cat #OC-100×2). Cells were electroporated on a MaxCyte ExPERT electroporator using the “Optimization #9” program. Subsequently, 100 μL TIL were transferred to a 96-well plate, each chamber was washed with 100 μL TIL media twice and transferred to the 96-well recovery plate, which was then incubated at 37° C. for 20 minutes. Subsequently, cells were counted, and seeded as described in Example 18. Further cell manipulations were conducted as described in Example 18. On days 17, cells were harvested and counted. Cell pellets were frozen, and editing was determined by NGS sequencing (FIG. 22). These data demonstrate that CRISPR/Cas9-engineered TIL manufactured with either IL-2 or IL-15 demonstrate editing efficiencies of the target genes SOCS1, ZC3H12A or both to a degree of 90% or greater.

### Example 20: Phenotypic Characterization of Tumor Fragment Expanded TILs with Soluble Activators

[0943] The phenotype of T cells produced from donor 4375 on day 17 was assessed. Gating strategy is shown in FIG. 23. Dot plots with CD4/CD8 population and dot plots with CD45RO/CCR7 populations are shown in FIG. 24. The proportion of cells that were defined as central memory T cell phenotype (Tcm, with marker phenotype CD45RO+ CCR7+, top right quadrant) or effector memory T cell phenotype (Teff, with marker phenotype CD45RO+CCR7−, top left quadrant) was determined by flow cytometry. Cells cultured as in Example 18 were taken, and on day 17 an aliquot of cells was stained with fluorescently labeled antibodies that detect marker(s) of interest. All conditions tested showed predominantly a Teff memory phenotype. SOCS1 and ZC3H12A editing increased Tcm phenotype compared with SOCS1 editing cells (FIG. 24). IL-15 cultured TILs had increased Tcm phenotype compared with IL-2 cultured TILs (FIG. 24). A significantly reduced Tcm phenotype was observed in No EP cells which could have resulted from missing a cytokine boost on day 10. These data demonstrate that IL-15-supported manufacture of CRISPR/Cas9-engineered TIL leads to a preferentially increase of TIL possessing a Tcm phenotype over IL-2-supported manufacture of TIL.

[0944] Half off-set histograms with CD28, CD27 and KLRG1 expression is shown in FIG. 25. All conditions (IL-2, IL-15, different edits) had comparable CD28 and CD27 expression. IL-2 cultured TILs had increased KLRG1 population compared with IL-15 cultured TILs. No EP TILs had a noticeably higher KLRG1 population compared with edited TILs which could be resulted from No EP TILs missing a cytokine boost on day 10.

### Example 21: ICOS Expression on Edited TILs

[0945] ICOS mRNA is one of the targets of REGNASE-1 (encoded by ZC3H12A) RNase activity (Uehata et al.). Half off-set histograms with ICOS expression is shown in FIG. 26. SOCS1 and ZC3H12A editing had increased ICOS expression compared with SOCS1 editing TILs. These data demonstrate that inactivation of ZC3H12A, encoding the REGNASE-1 protein, or both ZC3H12A, encoding the REGNASE-1 protein, and SOCS1, encoding the SOCS1 protein, in TIL leads to heightened expression of ICOS protein, whose mRNA is a direct substrate of REGNASE-1 RNase activity.

[0946] The data provided herein supports methods for activating and expanding TILs using unconventional cytokines. These methods include techniques for activating and expanding TILs using more streamlined approaches, including one-step approaches, approaches using agonists for stimulation, approaches more suitable for clinical manufacturing, and approaches without the requirement of feeder cells, are provided. Compositions of expanded populations of TILs are also provided, in addition to populations of expanded TILs enriched in central memory T cell phenotype.

[0947] The methods disclosed herein have a number of advantages over conventional IL-2-based REP methods for TIL expansion. For example, as shown in the examples, the methods disclosed herein can expand populations of TILs that have previously failed to expand using a conventional IL-2 based REP. Furthermore, IL-15 supports proliferation of effector T cells when included in the pre-REP or in the REP. Unexpectedly, single and double gene edited TILs have shown a 30-50% increase in fold expansion when grown in IL-15 compared to IL-2. Further, emerging from the REP, both unmodified and modified TILs generated using IL-15 have been found to express higher levels of CD25, a receptor for IL-2, in comparison to TILs generated using IL-2 in the REP. This suggests that TILs produced using IL-15 possess higher sensitivity to endogenous IL-2 survival signals upon infusion into patients in comparison to TIL produced using IL-2. The IL-15 based methods disclosed herein result in preferential expansion of effector T cells in the TIL population. In addition, applicants have discovered that, unexpectedly, expansion of TILs with IL-15 after the TILs have been edited using a CRISPR/Cas system results in improved TIL expansion relative to a conventional IL-2-based REP method. Specifically, applicants have discovered that when a TIL population is subject to simultaneous editing of multiple genes, the recovery and expansion of the TIL population is improved relative to a conventional IL-2-based REP method. Moreover, the methods disclosed herein produce TILs that are phenotypically and functionally similar to or better than those produced using a conventional IL-2-based REP method.

What is claimed:

1. A method of producing an expanded population of tumor infiltrating lymphocytes (TILs), the method comprising culturing the disaggregated tumor sample in a culture medium comprising (a) feeder cells or an agonist of a T cell costimulatory molecule, (b) a T cell receptor (TCR) agonist, and (c) interleukin (IL)-15, thereby producing an expanded population of TILs.

2. The method of claim 1, wherein the culture medium comprises the IL-15 at a concentration of greater than 100 ng/ml.

3. The method of claim 1 or 2, wherein the culture medium comprises the IL-15 at a concentration of less than 1000 ng/ml.

4. The method of any one of the preceding claims, wherein the culture medium does not comprise IL-2.

5. The method of any one of the preceding claims, wherein the culture medium does not comprise IL-21.

6. The method of any one of the preceding claims, wherein the culture medium further comprises IL-7, optionally at a concentration of 10 U/ml to 7,000 U/ml.

7. The method of any one of the preceding claims, wherein the TCR agonist is selected from a CD3 agonist, OKT3, and UCHT1.

8. The method of claim 7, wherein the CD3 agonist is an anti-CD3 antibody, optionally a humanized anti-CD3 antibody, or a soluble monospecific complex comprising two anti-CD3 antibodies linked together.

9. The method of any one of the preceding claims, wherein the agonist of the T cell costimulatory molecule is selected from: a CD28 agonist, a CD137 agonist, a CD2 agonist, and combinations thereof.

10. The method of claim 9, wherein:
the CD28 agonist comprises a soluble monospecific complex comprising two anti-CD28 antibodies linked together; or
the CD2 agonist comprises a soluble monospecific complex comprising two anti-CD2 antibodies linked together.

11. The method of any one of the preceding claims, wherein the TCR agonist and/or the agonist of a T cell costimulatory molecule are linked to a nanomatrix comprising a colloidal suspension of matrices of polymer chains, wherein each matrix is 1 to 500 nm in length in its largest dimension.

12. The method of any one of the preceding claims, wherein:
(a) the disaggregated tumor sample comprises tumor fragments optionally generated by a dissection method, that are 0.5 to 4 mm³ in size; or
(b) the disaggregated tumor sample comprises tumor fragments optionally generated by a mechanical method, that are 25 to 30 mm³ in size, optionally wherein the tumor fragments of (a) and (b) comprise digested tumor fragments.

13. The method of any one of the preceding claims, wherein cells of the expanded TIL population are genetically modified, optionally epigenetically modified.

14. The method of any one of the preceding claims, further comprising genetically modifying cells of the expanded TIL population using a gene-regulating system, optionally selected from a gene-regulating system comprising RNA interference molecules, transcription activator-like effector nucleases, zinc finger nucleases, and RNA-guided nucleases.

15. The method of claim 14, wherein gene-regulating system comprises a Cas enzyme, optionally a Cas9 enzyme, and a guide RNA.

16. The method of any one of claims 13-15, wherein cells of the TIL population comprise a modification, optionally an insertion, deletion, indel, or substitution, at one or more gene(s) selected from: ANKRD11, BCL2L11, BCL3, BCOR, CALM2, CBLB, CHIC2, CTLA4, DHODH, E2F8, EGR2, FLI1, FOXP3, GATA3, GNAS, HAVCR2, IKZF1, IKZF2, IKZF3, LAG3, MAP4K, NFKBIA, NR4A3, NRP1, PBRM1, PCBP1, PDCD1, PELI1, PIK3CD, PPP2R2D, PTPN1, PTPN2, PTPN22, PTPN6, RBM39, RC3H1, SEMA7A, SERPINA3, SETD5, SH2B3, SH2D1A, SMAD2, SOCS1, TANK, TGFBR1, TGFBR2, TIGIT, TNFAIP3, TNIP1, TRAF6, UMPS, WDR6 and ZC3H12A, optionally wherein the modification results in reduction or inhibition of expression of the one or more gene(s) and/or function of one or more protein(s) encoded by the one or more gene(s).

17. The method of claim 16, wherein cells of the TIL population comprise a modification, optionally an insertion, deletion, indel, or substitution, at the SOCS1 gene and the ZC3H12A gene.

18. The method of any one of the preceding claims, wherein at least a portion of the culture medium is changed and/or supplemented with IL-15 during the culturing.

19. The method of any one of the preceding claims, wherein the culturing occurs over a period of 9-25 days, 9-21 days, or 9-14 days.

20. The method of any one of the preceding claims, wherein at least 10% or at least 15% of the expanded population of TILs have a central memory T cell phenotype.

21. A method of producing an expanded population of tumor infiltrating lymphocytes (TILs), the method comprising:
culturing a disaggregated tumor sample in a first medium comprising a T cell-stimulating cytokine to produce a population of TILs; and
culturing cells of the population of TILs in a second medium comprising feeder cells or an agonist of a T cell costimulatory molecule, a T cell receptor (TCR) agonist, and interleukin (IL)-15, thereby producing an expanded population of TILs.

22. The method of claim 21, further comprising modifying cells of the population of TILs from the first medium using a gene-regulating system to produce a subpopulation of modified TILs, wherein the population of TILs cultured in the second medium includes the subpopulation of modified TILs.

23. The method of claim 21 or 22, wherein the first and/or second medium does not comprise IL-2.

24. A method for expanding a population of tumor infiltrating lymphocytes (TILs) comprising: culturing the population of TILs in a culture medium comprising (a) IL-15 and (b) a nanomatrix comprising a colloidal suspension of matrices of polymer chains, wherein the matrices are attached to TCR agonists and agonists of a T cell costimulatory molecule, each matrix is 1 to 500 nm in length in its largest dimension, and optionally the method does not comprise the use of feeder cells during expansion of the population of TILs.

25. A method for expanding a population of tumor infiltrating lymphocytes (TILs) comprising: culturing the population of TILs in a culture medium comprising (a) IL-15, (b) a first soluble monospecific complex comprising an anti-CD3 antibody or fragment thereof, (c) a second soluble monospecific complex comprising an anti-CD28 antibody or fragment thereof, and (d) a third soluble monospecific complex comprising an anti-CD2 antibody or fragment thereof, wherein each of the soluble monospecific complexes comprises two antibodies, or fragments thereof, linked together, and each antibody, or fragments thereof, of each of the soluble monospecific complexes specifically binds to the same antigen on the population of TILs.

26. A composition comprising an expanded population of tumor infiltrating lymphocytes (TILs) produced by the method of any one of the preceding claims.

27. A composition comprising a disaggregated tumor sample and/or tumor infiltrating lymphocytes (TILs) in a culture medium comprising (a) feeder cells or an agonist of a T cell costimulatory molecule, (b) a T cell receptor (TCR) agonist, and (c) interleukin (IL)-15, optionally at a concentration of greater than 100 ng/ml and less than 1000 ng/ml.

28. The composition of claim 27, wherein the composition does not comprise IL-2.

The application's sequence listing, which the Patent Office published only in electronic form, follows.

SEQUENCE LISTING (913 sequences)

SEQ ID NO: 1 - DNA, 1788 bp, Homo sapiens
gaacagagcgagctgcggccgtggcagctgcacggctcctggccccggagcatgcgcgagagccgccccggagcgccccggagccccccgccgtcccgcccgcggcgtcccgcgccccgccgccaggtgagccgggccctgggcgaggaggcgggagggaggagggaggggagtccagggcagccaggagtcgggcgagcctcgggggctgcagaatggggtcgcggccgcgatgcccctgaccctcgccggccccacccaggccgccccccgcgcgcggggctcccgcagcacagcctttctccggccctagcccaaatcgcccagaccaggcgcggatcccagcctggccagcaggcggcgggcgcggggcggcgagccggggccggacggctggagccagaaccggctgctctccacgcccccctctcggtgctgcccggaggccggactccgcctccaccgagcccccacccgccgggaagagctccgcggagtacagagcccattttctagctgtgtccactgaggctgaacggatccgcgcggacttggtgctccgtgctcgccccctagggccgggtccgccgggagcgccgccctccggagttgtccggccggcgcacacctgcccggccccgcagcgccccagctcacctctttgtctctcccgcagcgcacccccggacgctatggcccacccctccggctggccccttctgtaggatggtagcacacaaccaggtggcagccgacaatgcagtctccacagcagcagagccccgacggcggccagaaccttcctcctcttcctcctcctcgcccgcggcccccgcgcgcccgcggccgtgccccgcggtcccggccccggcccccggcgacacgcacttccgcacattccgttcgcacgccgattaccggcgcatcacgcgcgccagcgcgctcctggacgcctgcggattctactgggggcccctgagcgtgcacggggcgcacgagcggctgcgcgccgagcccgtgggcaccttcctggtgcgcgacagccgccagcggaactgctttttcgcccttagcgtgaagatggcctcgggacccacgagcatccgcgtgcactttcaggccggccgctttcacctggatggcagccgcgagagcttcgactgcctcttcgagctgctggagcactacgtggcggcgccgcgccgcatgctgggggccccgctgcgccagcgccgcgtgcggccgctgcaggagctgtgccgccagcgcatcgtggccaccgtgggccgcgagaacctggctcgcatccccctcaaccccgtcctccgcgactacctgagctccttccccttccagatttgaccggcagcgcccgccgtgcacgcagcattaactgggatgccgtgttattttgttattacttgcctggaaccatgtgggtaccctccccggcctgggttggagggagcggatgggtgtaggggcgaggcgcctcccgccctcggctggagacgaggccgcagaccccttctcacctcttgagggggtcctccccctcctggtgctccctctgggtccccctggttgttgtagcagcttaactgtatctggagccaggacctgaactcgcacctcctacctcttcatgtttacatatacccagtatctttgcacaaaccaggggttgggggagggtctctggctttatttttctgctgtgcagaatcctattttatattttttaaagtcagtttaggtaataaactttattatgaaagtttttttttt

SEQ ID NO: 2 - DNA, 1729 bp, Mus musculus
agcagagagaactgcggccgtggcagcggcacggctcccagccccggagcatgcgcgacagccgccccggagcccccagccgcggctccccgcgtcctgccgccaggtgagccaaggcagctgcgagggagcaggcgggaggggatgggaggtgatgggagcagagcccggcaggactaacctcgcagactgtatggcagggtcgaggatgccacgcctctggcgcccccccacccccgccccggctcccccaggaggcccctcgctcgagcggggcgccgtcagcccctcctctccggccctgagccctgatcctccgcccgggttccagtccccggcgtggccagtaggcggcagccgcgaggcgactagccaccagcggggacggccgggagtcgggcccctctccacgcccccttctccacgcgcgcggggaggcagggctccaccgccagtctggaagggttccgcatacaggaacggcctacttcgcagatgagcccaccgaggctcaagctccgggcggattctgcgtgccgctctcgctccttggggtctgttggccggcctgtgccacccggacgcccggctcactgcctctgtctcccccatcagcgcagccccggacgctatggcccacccctccagctggcccctcgagtaggatggtagcacgcaaccaggtggcagccgacaatgcgatctccccggcagcagagccccgacggcggtcagagccctcctcgtcctcgtcttcgtcctcgccagcggcccccgtgcgtccccggccctgcccggcggtcccagccccagcccctggcgacactcacttccgcaccttccgctcccactccgattaccggcgcatcacgcggaccagcgcgctcctggacgcctgcggcttctattggggacccctgagcgtgcacggggcgcacgagcggctgcgtgccgagcccgtgggcaccttcttggtgcgcgacagtcgccaacggaactgcttcttcgcgctcagcgtgaagatggcttcgggccccacgagcatccgcgtgcacttccaggccggccgcttccacttggacggcagccgcgagaccttcgactgccttttcgagctgctggagcactacgtggcggcgccgcgccgcatgttgggggccccgctgcgccagcgccgcgtgcggccgctgcaggagctgtgtcgccagcgcatcgtggccgccgtgggtcgcgagaacctggcgcgcatccctcttaacccggtactccgtgactacctgagttccttccccttccagatctgaccggctgccgctgtgccgcagcattaagtgggggcgccttattatttcttattattaattattattatttttctggaaccacgtgggagccctccccgcctgggtcggagggagtggttgtggagggtgagatgcctcccacttctggctggagacctcatcccacctctcaggggtgggggtgctcccctcctggtgctccctccgggtcccccctggttgtagcagcttgtgtctggggccaggacctgaattccactcctacctctccatgtttacatattcccagtatctttgcacaaaccaggggtcggggagggtctctggcttcatttttctgctgtgcagaatatcctattttatatttttacagccagtttaggtaataaactttattatgaaagtttttttttaaaagaaacaaa

SEQ ID NO: 3 - DNA, 98858 bp, Homo sapiens
gctcgggcgccgagtctgcgcgctgacgtccgacgctccaggtactttccccacggccgacagggcttggcgtgggggcggggcgcggcgcgcagcgcgcatgcgccgcagcgccagcgctctccccggatcgtgcggggcctgagcctctccgccggcgcaggctctgctcgcgccagctcgctcccgcagccatgcccaccaccatcgagcgggagttcgaagagttggatactcagcgtcgctggcagccgctgtacttggtgagtcgcggacccacgcggcagtcgccgacctcctccgagacccggactcgtgccctgtccgcagggtccctcccgcctcccccgcctctcgcctctagcctctcgctcggggcggaagtggcggcgcggtccgcgtcaggggcgcgcctgcgctgaccgctctcttgctccttttggtttaaaaaaaaaaaaaaaaaaagcatacttgagctgagcagctcatggttagcgcaagcgcagttagttctggagggcggtgccacagcggcttcttggggagcgcgtggatgcgccaccagcgttgcgcggcccgggtctgggggtccttgggaaagccgtgggggcgctcgggcgcgcgcccccgggccgcagcttcgccgtagctcccacgccgctgtgcttggttcttgctcgcggacagctctttctctggccgggtgttttgtggccgggtgggcagctggcgtccccgggagcggtgagggcgggggcgggcgagccgggccgcggcgtccgggtccagctggcgcccgcgcaggacctgtgggagcaggccgctctgggcgccgggccggccgccgcagccctctgcgaggcgaagctcgctctcctggcggagccgcggtggttgggggtggctcgtggcctctggcgagggcagcgctctcgggaccctccgtcttcattttcccccgtggcccagcagcgcccagcgtgggttcggcccccatagaaccttcccggaacgaaagaggctttgcttgtgttcgtccagtgatagcgtgtcattctctttatagttttccttactgaggtatactttccctacagtgaaacgcagctttcatgtgtgctcccagacgggtgtcacaaatgaatcccctcttgcaagccccctcaaatcaaaatagcctttccttgccctgagaaagtgccctcatcccctccccgggggcacggtgttccgatgcctatcgccctaatcgtgcctgttcagctcacatagatgcaatatgtagtataaacacctgtgattcgctttttttatgtcaactagactaccttttaattcaaacaaaactttatctcttttaaaatgatgtaactgctttccccttcgtttaatccttgtcgtattattcccaagattgaatttggtgacggttaagttaatgctgcttctgatgtttggttctctctgtgtaaagtaaaagacgggctttcctgtaaatggatgatcctgggtttttcccctttccatttaattagatggcagtgaaaaatgtgttcagaaagtaacgttttcttcttgaacacattagtgggaagtataaatattctgattcccatgatacagagtatgttagaatagggatctaagttttaaagaatgctggtaaggactcttccaattatagacaatctgaaacgcaaattctggtaggaatcttcatgtgagagagcctgccagctgcatcttctccagttacatttgttttagcagaggctgctgtctctctaagggataggttatatatcgaaatagatttgaaaagagaaaagtgaatataacttaattcagcttaacattttggtttaagaaatttaattttctttggtatcattaatatccttgaaaattcaatgagaattgtgattcctctttccagaaaaatgaacttaactcgcatccactggagatttcacatgcattttcaaaaagataaggaaatccttctatagattcttaccgaggaatcctgtagtttccttggttggtcaatgctcatattattttttcctagttgaaaacaagaccattagtttggtcagtagaaaccatggcatgcacactggtgttacagtaaaagtaggtcacaaaccaagaaagttagtaatggaaagcaagtcaggaagtttgagctatgtgttctcctgtggccttagaacatccattcagccattccacaaatatgcccggacccccagtggagttgcagcttttgctcctggccttggggattcagcagagaatgctcctggcaagtttcctaccctcgaggtgctcactctagggcttattcttttggggcctcattgtagttccatattttcattcattcgttcataacatgcttgttatgtgctagtgttagacactgaggattcttgttaaaagacaggagtcccagtttttaaggatgcagccctgtaaataggtaagctgatgaaaacgttaaagtgatacatgtaaagctagcttgaagcacagggtcttgtggagttgagttacctaggagtcctgtatttcccaaaaaggggtacacatgggagttctggtgaagcttctcgagggagggaggacctcacctaagtcttgaaagacattggccaggggaagaggacaagggaggtgaagagaattactgttccagcaaggagggagtgcacaaaggcactgagggaatgctgagagaaccacccacagtttagcctggagactggtgtgaagttgagatgctggagagtaaggcagagcctagatcagactaaggaatttgagctgtttaataggaactcattgtggaattgtaagtctggaaataccatgatcatatttgcttcttttttttttgacagagtcccgctctgtcgcccaggctggagtgcagtggtgcgacgtcagctcactgcaacctctgcctcctgggttcaagtgattcacttacctcagcctcctgcgtagttgaaattacaggcacacaccaccatgcccggttgatttttttgtacttttagtagagacagggtttcgacatgttggccaggctggtctcgaactcctgacctcaggtgatccgcctgcctcggcctctcaaagtgctgggattacaggcatgagccactgctctgggctgatcatatttacttgttagcaagatcgttctgactgctagcagactggatgaggaaagtgtaggcacgcagcacagggcagtagtcggttggagtaaacctgaagagacatgatgagcttctgttaggcagtggcaggagggatggaggggagatacagatttgaaatgaaatggtaaaggggtatacgttatgtacaagtttggttttgaaactttaattctgtttgaggtacctgcgagacactgaaatgaagctagttgaatgtataaatttggagttcgggagagagggtctgagtaaatgtgattttggaaatcatgaacacatgggtgatatttgaggtcttagacattgatgagatcatctagggaagatacagagcgtttggaaatatcaaaggccaaggacagaatcttgacagacaacatttaaaaggatgggtggagaaagaggaacttgcaaaaaagactggtgaggaacaaccacagaagtggggaggaaagcagtggagggagttgagggtgagcagggccacctgacaggtaagggccagcctgagagggccatgacattgagcagctagattaacagataccttaaagggagttgtgtcagcggactacacaagacagatacctggagttcaggagagaaggtaggaggaaatgcaaactaccaagtgtacactgctctttttagaagcccaacttgaagaagtggggagaggtagctaaaatgaagcaagattgtgtgacttctcacttaaacccttgaacggctttccgttgctcacagtgtaaattcagcccctcctccggctcacaagacctcatggcctgtgtctcttgcttgatttcccctatcactttcctccctcttttccactgtgttgtattcttggaagtgtgtgtgtccattctccccttagggcgtttgtaaatgttgttctctttgccttggcacaactttccccccttctctttcctttcttgcttaaactgcctcctactcatccctgaagtctcacttccttggcaggccttcttgacctgcccatgctgggtatgagcccctgttgcgtacttctttagcatcccaagacttcccctttcatagcgggaattggatgtcatacagcagcaaatgatttcgggaacacaatttgcattaagcaaaccactatcttgaaagtaacacagcttgagtaggaaaaaagtgtttaaggtggctttctgctttgtttagcacagcagtgggtgatgtttctgataatgtttttgaagagttgtgctttttttggtaatgctcatggagctgggaaaagaaaggctttgctcttgagcaaaaactgagtacaactaaaagctggacttgcttagtggtaggagaacttgataccttgttgaaattctagcgggaaaaatgaatttagtattttgagtctggaactctggtcccttattcctttttgctccttttgaaaagtgtcttttatttcatgagtttgataataggaggtttcttagaaatgaattattgggttggagcagaacagactctgttaatctgagtttatattttttattacttcttcagagtttcatgaaggcactgccagtgctttgcacagtatcaggtgcttagtaagcacttgaaaatatgtgctgaatgaatgactttttacgaggaaagggcaacttgatatatttatgtgattgcagggatgaacctaaagagagaggtggaggttgaaatagaagggatgattgttggagccagaaatcttagaaagcaagagtcaatgggaccaagagcacacaggtggaagaattgatcgtgaaagagtgctggccaggcggtggctcatccctgtaatcccagcgctttgggaggctgaggtgggaggatcacttgaggtcaggaggttagggctgcagtgagccataattgtgccactgcactacagactaggtgacagagtgagatcctgtctctaaaacaagaacagcaaaacaaagggtgcagttggaaaagtttaatttggtctgattgtgtgaggttaattctgactttttgagtaatgttcatgatccctttttggcttttccttttgtcactgctgattgctgtcttcatcaggctgagctttgagaaaggcagagagaaggaatggagtctgtgtgcctactgaggaaaagactaaaactggggaatcgcaaaagctatgttatgggttgtttctaagaagtgatggctcagaaggaatttggcttatttatttttaaattcctttcttttttaaagagttctcactctgttgcccagtctggagtacaagtgcagtggtgcaatcatagctcactgcaaccttaaactcctgggctcaggtgagcctctcacctcagcctcttggaaattggttgattaattagggtttataaacaatggaactcctgactgacttcatttttctttttttgaaaccaagtcttgctctgtcccccaggctggagtgcagtagtgtgatctcagctcactgcaacctctgctccccccaggttcaagcagttctactgcctcagcctcccgagtagctgggattacaggtgcccaccagcacgcccagctaatttttgtatttttagtagaaacggggtttcaccatgtttgtcaggctggtcttgaactcctgacctcaggtgatccacctgcctcggcctcccaaagtgctgctgggattacaggtgtgagccaccacgcccagccacatttttctttttctttctttttttcctttttctttctttttttttctttttctttcttttctttttgagactgggtctcactttgtcacccagtctggagtgcagtggcgtgatctcagctcactgcagtctcgacctcttgggctttagacatcctcctgcctcagtcccccacgtagctgggcctggctaatttttttgtattttttgtagagacagggtttaactattttgcccaggctggtcttcaactcctgagttcaagcaatctgtccacctcagccttccaaaggcttaggattacaagcatgagccactgtgcctggccatttttcttttttctttttctttttttgagacagtcttgctctgttgcccaggctggagtgcagtggcgtcatctcggctcgctgcaagctctgcctcccaggttcacgccattctcctgcctcagccttctgagtagctgggactacaggcgcccgccaacactacaggcgcccgccaccacgccaggctaattttttgtatttttagtagagacggggtttgaccgtgttagccaggatggtcttgatctcctgactttgtgatccacctgcctcggcctcccaaagtgctgggattataggcatgagccactgcgcctggccgccatttttctttattagaaatttgtagttcaaatattgctagagaacaatttttaccatttgtgagtcagctaatttttagaagtcagatatcaagtgcacactgttcttctcatacttacagcggggcagccagttaggcaggtgaatcaaagctgtcttattctaaaacacttcccttgcctactagttacacattctcctgcctgctgtctaatctcagtgcttttacatggttgcacaaactctgaattcccttgaagattggctactctctcacaccttggagtcttcatgtgttggatatactccatgcctaccatatctatttgggaaacatcttcaagactagaccgtagtctccttgggcaaagttaaatgctcccccttctctcatttcttagttctctatattcttttattagaatatgaaccacattgttttgtaactgtctacttgtctgttctgtgtagctccttgagggtggtctttttttttctttgttttcccaccacctacctacgggacctgaaacatgttagatgctcagtaaatattcagtaaacacaggaaaactgttcccttttaaaatgtcagcaccttagtttattccaaacccctcatttatggctgaggaaacactgggccaatacagtgttgtgacttatctgatgttacaatatctgctagtgtcataactgggactcaaatccagtccttctgattctcgtttcagcactgccctaatttacccatgtgactacctgtagtgctttcttcttatgatctatttgagatcagtggcacagagggaatcgtcttaattttgatggctaggagggagtggatgtgttataataggtagggtcattttgggacttgaggcctttaaaacagtgtctgggatccagggatcagacttgaaaggtatttgcaaatctcctgaaactgctaaattttatgtacgtgtgttcccaggtatttcgtttctaggtgattctgtagcttttgtcagtttcttagtggatttgtctgtgatccctcaaaaggtaaagaccactgcttgaagggaaagcagccttgggatgggtgccccaatggggaatgtatacctagaaatcatattgttttgcctttgacatgtgtttatagattactgatatctataattacggaaatccagatagttgcgtttgtctcctagcttttctagttgcctcttttttgatttcttgattttaaccagaatcttctttttttcttgagaaggggtctcattccgtcacccaggctggagtgcagtggcacgatcgtaggtcactgcagactcaaaactcctggctcaagtggtcctttgcctcagcctcccgagaagctgggactacaggcacacaccaccacgcctgacaaatttcttcttcttcttcttctttttgttgttgttcttgttggccaggctggtctggtcttgaactcccggcctcaagtggtctgctcaccttggcttcccgaagtggcgagattacaggcatgagccaccatgcccagcccttaaccagaattttgttttgttttgttttttgagacagggtctcactctgtcacccagactggagtgcagtgatgagatcacggctcactgcacagatgcacgccaccatgcttggctaattttttatgttttgtagagacaggttctcaccatgttgtccagactggtctcgaactcccgggctaaagcgatcttccggcttcacccttccataatgctggggagccacagtgcttggccaaccagaatcttaaaagccctttttactttttccagatagttactctgcagagaatttctgattcccagttggagaactgttacagctctctcagtcccctgctgttcttttagctaccttgtctttgtcctcttacctgtccactctctactccccttcttccctttggtctccaaatagtccagataaaccagagagatggacagataaggtctgggtacgcgaaattaaaattaacatagtgtgctcttcactttcttgaataaacgttacgtatgatttgtttcccttggaaatcctcatctagattctctactctctattccttaacttaatgccccattaaggtagttttttcttaatggaaagctgttgagagtcagaggatatttaaaccaactaataaactgaacttttaataataccacccttactttggataagagtgattagccatatactaaatcctcaatcagtttagcatgtaaaatttaagacatagcagctgataactgaggaagagatacatttccacaggctaactttaaagaatataagctctcactttcctgagtagaagaaaactaaacttttctgttctatgctttttttttttttaatttttatttttattgatcattcttgggtgtttctcacagagagggatttggcagggtcataggacaatagtgaagggaaggtcagcagataaacaagtgaacaaaggtctctggttttcctaggcagaggaccctgaggccttccgcagtgtttgtgtccctgggtacttgagattagggagtggtgatgactgttaacgagcatgctgccttcaagcatctgtttaacaaagcacatcttgcactgcccttaatccatttaaccctgagtggacacagcacatgtttcagagagcacagggttggggggtaaggtcacagatcaacaggatcccaaggcagaagaatttttcttagtacagaacaaaatgaaaagtctcccatgtctacttctttccacacagacacggcaaccatccgatttctcaatcttttccccacctttccctgctttctattccacaaaaccaccattgtcatcatggcctgttctcaatgagctgttgggcacacctcccagacagggtggtggccgggcagaggggctcctcacttcccagtaggggcggccgggcagaggcgcccctcacctcccgggtggggcggctggccgggcgaggggttgacccccccacctccctcccggacggggcggctggccgggcggggggctgacccccccacctccctcccggacggggcggctggccgggcggggggctgaaccccccacctccctcccggacggggcggctggccgggcggggagctgacccccccccaccttcctcccggacggggcggctggccgggcagaggggctcctcacttcccagtaggggcggccgggcagaggcgcccctcacctcccggacgaggcggcaggccgggcgggggctgatccccccacctccctcccggaaggggctcctcacttcccagtaggggcggccgggcagaggcgcccctcacctcccagacggggcggctggccaagcggggggctgacccccccacctccctcccggacggggcggctggccgggcggggggctgaaccccccacctccctcccggacggggcggctggccgggcggggggctgaccccccaacctccctcccagatggggcggctcgcctggcgggggctgacccccacctccctcctggacggggcggctgccaggtggagacgctcctcacttcccagacagggtggctgccgggcggaggggctcctcacttctcagacggggcggctgccgggcggagggtctcctcacttctcagacggggcggttgccaggtggagggtctcctcccttctcagatggggcggctgggcagagacgctcctcacctcccagacggggtcgcgaccgggcagaggcgctcctcacatcccagacggggcggcggggcaaaggcactccccacatctcagacgatgggcagccgggcagagacgctcctcacttcctagatgggatggcggccgggcagagatgctcatcactttccagactgggcagccaggcagaggggctcctaacatcccagacgatgggtggccaggcagagacgctcctcacttcctagacggggtggcggccaggcagaggctgcactctgggcactttgggaggccaaggcaggcggctgggaggtggaggttgtagcgagccgagatcacgccactgcactccagcctgggcaccattgagcactgagtgaaccagacaccgtctgcaatcccggcacctccggaggccgaggctggcggatcactcgcggttaggagctggaggccagcccggccaacacagcgaaaccccgtctcccccaaaaaaatacgaaaaccagtcaggcatggcggcgcgcacctgcactcgcaggcactctgcaggctgaggcaggagaatcaggcagggaggttgcagtgagccgagatggcagcagtacagtccagcttcggctcggcatcagagggagactgtggaaagagagggagagggagaccgtggggagacggagaccgtggggagagggagaggaggcagagggagagggagaggcttttttttttttttcttgagacggagtcttactctgtcaaccaggctggagtgcagtggcacgatcttggctcactgcaacctccacctccctggttcaagtgattctcctgcctcagcctcccaagtagcagggactacaggcatgcgccaccacacccagctaatttttgtatttttagtagagatggggtttcgctgtgttggctgggccagtcttgaactcctgacctcaggtgatccacccaccttggcctcccaaattgctgggattacaggcgtgagccaccgcgtccagcctgttacattcttaattggaatagcattgccctgcagtgccattatctgaaatagcttttaagaatgaatgtaatgccattttaaatgtatttaaatgttgtgccgatttaatgttctatgtacggtacagtactactaatggttcaagaagttgttttgacttaacagtgaaatccttgcttttaaagatcatagatacctttagacacctttaagatgaaacatgtttatgagaggaaatgtccgcacaaatacaatcccccgcaaacttagcatgtggttttagtaggttcataggcccacctggtgatccctaggataagaaattgtggtcaagaaactgatttcaggggccgggctggtggcttacacctgtaatcccagcactgtttgtctcaaaacaaagaaactggctcaaggttggatacttttcaaacgagaggaatggaggaagggaatgcaatgaataacttttcaaatccagtatgtctgatttaatatgccgtttgctctgtcagtttcatttggttcgtgtcactgatcatttataaccttttttcaaactgctttcattcccctaaggaaaatctgatactgaattattttatttcttctttcactatatttgaacggttttatagtctgaaagctatcaatttctcattacagtttacttcatagtacttctaggaattcttcctgtggtttgaggtaaggctacaggattcctagagtttgtacccctctagtcccagtaaaggacctggtacatcaatcagggtagccctagaaagttggagtaacttcgtaacagtgggaactgcttctgttctatgttttttgtgggttttttatttgtttttgtttttttgtttttttgttttttttttgagacagagtcttgctctgtggccccaggctggaatgctacggcacgatctcggcttactgcaacctctgcatgctgagttcaagcgattctcctgcctcagcctcctcagtagctgggattacaggcgtgcaccaccacgcccagctaattgttgtatttttagtagagacagggtttccccatgttggccaggctggtcttgaactcctgacttcaagtgatcagcccacctctcagagagctgggattatacatgtgagccaacatgcctgccctgcctcattctttatactacagtaaagtcccggttgggcaataatctaaacataaaagaaatgaaaccataaaattatataagaaaacaatggagaaaattttttgtaatcaacagagtgaaaaaggattttttaatgccatgtcacagaaacctagagaaaaaaggtttaagtttgatttcataaaaatttaaatttttgacataaataccataaaggtcaaaagataaaaaattttaaatattttcaatatataacaaaaactaaactttcttaatatgtaaagaactacatatcaaaaagagagcggaaatacagatggcttttaaaaacaggtaaagctgttcaccttcacaataataacaatttcaaattatgactataataataccatttttcacctatcagacaaagatgaaaaagttcattaatataattgtgtaggtgaagctcaggcactttcttatattattggtgacagtatacattgatatagcttctttgaaaggttattcatagcagcattatttataacagctaaaacctagaaataacctatgtgtcccattatagatgactggctaagtgatgaatactattaaattgttaaaaagaactcattatctatatggaagtacttttaatatatactaagtgaaaaatcaaagtgcaaaacagtatgctaatatctgttttgtgagggtgggatggatacttggatggaggaagacagacaggcagtctggcttatatatggatagaatgtctcggaaaatatacaaggcactggttacagttatcacctaagggaaaggattgagggagaggagaatgtgacttaactttttcactatatacccttttgtacggtttaatttttgccaagtccatgtaatccatgtatacatagggagcatatgtatataaatatatgtaaatataagtaaaaaaatatgtatgtgctgccgggcgcggtggctcactcctgtaatctcagcactttgggaggccgaggtgggcggatcatgaggtcaggagatcgagaccatcctggctaacacggtgaaaccccgtctctactaaaaacacaaaaaaagtagccgggcgtggttgcgggcgcctgtagtcccagctgctcgggaggctgaggcaggagaatggtgtaaacctgggaggtggagcttgcagtaagccaagatcgcgccactgcactccagcctgggcaacagagtgaaactctgtctcaaaaaaaaaaaaaaaacaacacgcttttctctctctctctctctctctctctctctctctctctatatatatatatatatatatacacatatatatatacgtatatatatacatatatatacgtgtatatatacatatatacgtatatatatgtatatatacacatatatatacacatatatatgtatatatatacatatatatacacatatatatgtatatatacacatatatatgtatatgtatatatatacatatatatatatatgctaaagttaagtactggattcctatctgtatctgctacctaactgcagtataaatcttggaagttgagtctgttttctcatttgtaaccacctcttagataacacacataaaagcacatagcacatgcctgacacacagtagggttcagtgacagtgagctgttttagtctctaaactctcttcctcaaagagagcttctcaaagaaaaaaaaatgtagtgaagaaaagaacttactccaccagggatcttctctccccagccagtggcaggcatattaagggctataagtaagtggttattttaccatcctaaagtaatggtgtttcaaagtatgcaagattcttcatacttcactgtgtccttttctgagcatctttgtagagagtatatgcacaaacatctgactaacaaagggaacacttttcatcatataatttaggattcacttagagacctaaagtataaagaaagaaacttaggtatgttagcccataaggagaaactcattatcaatttgggattatcttaaggtcctaccttataaaattaaaatttaacagaagattattctttttcaatttcctaagttcttatttgctactacatcgtagcagttcgagggagaatttggtctaacgatgtaatgttttctgtatgccatacatagaacaaagctatgtacgaaatactaaaaatattatttgacattatttaataaaatattataactatttcaccccgataatgatggaaattaagttgcagtaatatagatttttaaaataaaaacttcaaaaccaggcgccatggctcacgcctgtgataccagcgctttggaaggccgaggcaggcagattgcttgagaccaggagtttgagaccagtctaagcaacatagcaaataaaaataaaaaattagccaggcatggtggtgtgcctgcagtcccacctacttgggaggctgaggtggggggatcacttgagcccctgaagtcaaagctgcagtgagctgtgatcacaccactgcattccagcctgagtgacaaggcaagactttgtctcaaaaatataagtaaaataaaattaaaattttacttgtttatttttttgagacggcgtctctctttttcccaggctggggtgtagtggtgtgttctcggctcaccgtaacctctgcctccggagttcaagcgattctcctgcctcagcctcccgagtagctgggattacaggtacgtgccactatgcccagctagtttttgtacttttagtagagacagggttttgccatgttggcaaggctggtctcaaactcctaatgtcaagtgatccgcctgcctgggccccgcaaagtgttgggattacaggcgtgagccaccgcacccagccttaaaactttaaaattcagaatatgagcctttgttttatagcttcacttgttaaaacaaatcaggagctgggtgtggtagctcacgcctgtaatcccagcacttggggaggctgaagcgggcagatcacctggtctcaatctccctgaactcgtgatccgcccgcctcagcctcccaaagtgctggaattacaaacgtgagccaccacgcccggcctgaagtttgaagtttttaaaaagaaagagttgttaggcataattgtgtaaatagaggtaaaaattgacagcaagaaaggcagtagaaaactatgacaaatgaaggtgatggctcacgcctgtaatcccagcactttgggaggccaaggcgggcggatcacctgaggtcagtagttcaagacaagcctggctaacatggtgagaccctgtctctactaaaaaatacaaaaattagccaggcatggtgatgtgcacctgttatcccagtcacttgggaggctgaggcaggagaattcacttgaacccgggaggcggaggttacagtgagctgagatggcgccacttcactccagtctctccagtcagtccagacagagtgagactcaatctcaaaaaaaaacaaaaaacaaaaaacaacaactatgacaaataagtgtaatttcccaggactattaaggtcttgtaatcccatgcactggaagcttttgttgttgttttctgatttatcattgaagtgaccaaagcgcagtggtaagaacaagcctttgtgattacttcacactagagaagggtctttcccacatatttgagacttaaggagttgatagtgaacagtgtaagcggccacacaggtgtgggttaagaactgatgtgtgtattcactttctgtaaagatgaccaaacatatgttgttagacaaacgaaaaattcaccccaagatcattgagggcatgcaaaatagtatgaggtagaggcagctgtaattcaggtgtccaaatacaagagcaggtggagaaaagaaaagaaactgagaacagtaaagagtttttaaagttataacacacaattgttaaaatagaatgttcagtaccaagtagcagagtagataatgcagaacactgaggtggcttgagaaaaatctctcagaactcaggaaagaggtgtgcgaaatgagcgttaggagagagcacttccccaagtctgtgatagaaattcctgaaagggaacagaggagactgaagcgaaactctattaagcgacaaggaagactcaaatggagaagctaacccagttccgatgaagacttggcacatatctataatgtattttttttgaagtcagccaaaagaaagtttaaatttgaggtacatctgaaagagtaagcaatacagaaaaatcttgacaacatctgaggacaaaaaaaaaagtactgatactgttgagtgtgaggcaaaacctcactttcagtctttcttgagaaatattggcaaaatatgcccttaatacaggagttccatttttatttcatttatttatttatttatttatttattgagacaggttctcactttgtcacccaggctggagtgcagtggtacagtcactgctcactgcagccttgacctcctgggctcaagtgatcctcccagctttgcctcccaagtagctgggactgcaggcacgcatcactacgcttggctttatttttatttattatgtgtttatttttatttttattttttgtagatacgtggtttcaccatgttgcccaggctggtcttgaactcctggcctcaaatgatcctcctgccttggcccagagtgtttttgttttttttttttgtttgtttgttttttgttttttggagacaatcttgctctgtcacccaggctggaatgcagtgagtggcgcgatctcggctcactgcaaccaccgccttctgggttcaagcaattctcctgcctcagtgtcccgagtagctgggactacaggtgcccaccaccatggccagctaattttttgtattttttagtagagatggagtttcaccatgttagccaggatggtctcgatctcctgacctcgtgatttgcctcggcctcccaaagtgctgggattacaggcatgagccaccacgcccggccgagatatatttcacataccataaaattcacctaaaaggtacagtttagtggtttttagtatattcacagctgtggaactaaatcttaatttcagaatattttcaacaccccaaggagagactgggtacatacagttattctccattctcacccacatcccaacccctgacaaccactaatctactttctgtctccagatttccctgtcctggtctcataccatgtgtagtcttttgtatctgtttttttgttttgttttgttttgttttgttttgttttgttttgtttttgagaggagtctggctctgtcgcctaggctggagtgcagtggtgcaatcttggctcactgcaagccccgcctcctgggttcacgccattctcctgcctcagcctccccagtagctgggactacaggcgcccgccaccacacccggctaattttttgtatttttagtagagatggggtttcactgtgttagccaggatggtctcgatctcctgacctcgtgatccacctgcctcggcctcccaaagtgctagggttacaggcgtgagccaccgcgcccggctggtttctttaacttagcataatgttttaaagtttcatctgtgttgtatgtatcattactttgtttcttcttctaagttagtaagattccattatatagatatataccattttgtttatccattcaccagttgatggacaaatgattgttttagctattattaaaagtgctaccatgaacatatgtgtccaagtttttgtgtgaatgtatgtattcgtttctcttgggtatgtgccttggagtagaatagctagttcatatgttaactctttgttcagcatttgtttttctaaagtggctacatcattttaacctttagttttttgttttttggttttttttttgggagtggggtggggctggagtgcagtggcgttatctcggctcactgcaacctccgcctcctgggttcaagcaattctcgttcctcagccttccgagtagctgggactacagacacatgccatgacgcccagctcactctttttgcccagctcactctttttattttagtagagacagggtttcaccatgttgcccaggctggtctcaaactcctgagctcaggcaatctgcccacctcagcagggtttcaccgtgttgaccaggctggtctcaaactcttgacctcaggcgatccacccacctcagccttccaaagtgctaggattacaggcatgagccactgtgccccgcctctctcttttttttttttttttaataaagacagagtcttgctctgttgtccaggctggcatgcagtggcgtgatcacggcttactgcagctttgacctcctgagctcaagtgatcctcccacttctgcctcccaagtagctgggaccacagatgtgtaccaccatgccttgctaattttaaaattttttaatagagatgggggtctgtctgtgttgcccagactggtctcaagtgattctcccacctcagcctcccaaagtattgggattgcaggcatgactcacagcgcctggcctcagtttctttcaagaccatcctataacaccaagttagtttgaggattctatgaatgtctgcttaaagatatccttctgaattctgtgattctcttgaaaggcttgttgcaatgaaaaacaaagtataatgatgactttatgtgaagtatacttttggaatttcttaagcagaagtcctgagacttttgagagtccctgtatttaaacagtaccatttaggcacagttactgcttatgaaatgaagagtagctagatgaatataaaaaatcttactcttacatttcaacccagcattatttgaacccagcaaaattatttctatagtagaatcaatttagttccttattttaagccatgcatatatatctcaaagcaaatttcaagagggattaaatgttattatgtgaaaatattaggaggtgaaataataggagaaagtaaacacattgaaagtaggtatgttcaggccaggcgcggtggcttatgcctgtaatcccagcactttgggaggctgaggcgggcagatcacgaggtcaggagatcgagaccatcctggctaacacggtgaaaccccgtctctactaaaaatacaaaaaaaaattagccgggcgtggtggcgggcatttgtggtcccagctactcgggaggctgaggcaggagaatcgatttaaccctggaggctgaggttgcagtgagccgagattgcaccactgcaccctagcctggcaacagagcaagactctgtctcaaaaaaaaaaaaggaaagtaggtatgtttacaatttaaaatctttgggcatggagataagctataaggccattgatcagaatggaccatttcataatgttccaaaaattagactactttggaaaaaggtggtgtgtggtcttaatgtaggcaatgcacatgtgtgtttaagtttcaaatacagctaaggagctaagtggaattttttttttttttttttaccaaatagcgtgtattaataatagctcagttccatttactgatttgtttttcctttgtttatgtcatatattatctttccaagagattgtgagtttatgctactgccaatttggtatgagggcctgtttttaaaagagctgcatgatattcacttggatgtaccacgatttattcaaccagtcttttctttgtcattagacatttagtttatttaaagcctttcaacattataagtaactgtgaaagatatctttgtgctatgagttgcctacattttggatcattgccactaagaaagaaattaactagtgactcaattattccttgctttttttgagcaaaaatcatattaaaaataattagatttaaaatttttggttaaattatactttaaagcaaagatccttgccatttagatctagtttggtattaaatgagaacggtggttctctactgtgttggtgggggatatgttcatgatggattttgctgtggaaggacatttggcaatgcctggagagagttttggttgttacagatgcagggaggggtgccactgacatctaatgggtagaggccagggatgctgctgctaaacatcctgcaatacacaagacagtccccacttgcccccccccccccaaaaaaaattagctagcctaaaatgtcagtagtgctgaggctgagaaaccttggattaacaggtttcactgctgatgggaaacttttttttttttaacagggccttactctgttgcccaggctagagtgcagtagcaggatgctagctcactgcagtcttgaactcctgagttcaagcaatcctcctgtctctgcctcccaagaagctggaactacacatgcacaccaccatccccagctaattaaaaaaattttttggcagagctggtgtcttactgtgttgcccaggctggtctcaaactcctaccctcaagtgatccttccagctgggcctcccaaagcaccaggattgcaggtgtgagccactgtgcccagaggaaacattcggaatctgtgatagaaggggaaggttttagctccagaacacaagtagagctggctttgccttatgtgatagacctagtgaatagctcagctgtctgctttcctaatgccatttagacagatactgtatattttattgcttatgcaatgtgcttataaaattgtttatttttgtgtcttgggtattcctgaaaatgcctcatcagtgtcagatctagttgctgttgagatttggttttgctgcgtatattacagacctgatttagctacatgggaaagaaaattaatcaatagctgatttaacaaccaggagtttatgtttctcatgtgatatgaattctggagagagacttaagggctgttactgtggcttcttgatgtcacccatgactcaatgctggtatttctgcttacctttcttaggaatgtgcattttaccttgctgtcacaggatggctcctgcctgttcccacccctcacccccggcagcaaaacctatgttccaggcaggcagcagtgaggacaaaggtacctggagccagtcctctttgtcagcgttttcctgcagccccaacccagtggtttctgcttattcccattggccagactgtcacaggaccttagaggctgggacaaatagttttcagctgggctcattgtggtctgaaaacaaaagcagttacctttagtaagaaagaaaggatattggggctgggtgcagtggctcacgcctgtaattccagcactttgggaggctgaggcgggcggatcacttaaggtcaggaattcaagaccagcctggccaacatagtgaaactccgtccctactagaaatacaaaaattagccaggcatggtggcgcatgcctgtaatcccagctactcaagaggctgagacaggagaatctcttgaacccgggaggtggaggttgcagtgagctgagattgcaccactgcactccagcctgggcaacagagtaagactctgcctcaaaaaacaaaaaaaaaaaaagaaagagaaagaggatattggaataaacgctaatatgcacctttgggagctgctttttgaaatattggttcttgtaagttcactgaaattttttttataaagtagaacaatattggagatttgaaagaatggactcaatgcaagagatcttattagctgagaaaatgtatttatgttatgaatgtatttcttaaccccaagaacttggctgttgtattgtgttttgtaaattttaaatctccctactactatactgggggccttaccctcttttgtatagtgcacacaaagaagtgtgtttctctgggctaaaaatagaaatctgcacctgacagatggccttaagtgtggaaaatgggtgtgtgtgtatcacagaagtggaagaagtggagggagtcctgctctgcctgttgttttaagcctcccctccctgcaaatctatatctttcctatacactagtaatggtcaataggtttttgttgttgttgttgttttaatcccatttacagtagcgacaaaacttatcaggtatctaagaataaacctttattatacatttatgctaacctttagcatacctttatgaagaaaactacaaaattaattaaaatatcatgaacggcaatgcaaatggggagaataaataggggacaacttgccttccagatgcattgattacaaagctgtagtaactaaaatttgatactgtctcaagggcaagcaaatgcttctgtgaagtagaatgaggatctagaaacagactcctgcgtgtgctgaaacttggtttatgatagagcaggtgttactgataaatgcagaaaccaataaatggtattaagtcaattaactttccatttggaagggataaaattaaatttctcttccacgtgcaggctaataacagtgtcttatatcttgcaaaagtacttaccagtccattcacttccagaaaaatggagaagtttcatattagaaatttgtgcatcatgtttcataaataaaaacttcagatactcggctgatggtgttggctcaaacctgtaatcctagcactttgggaggctgaggcaggtagatgacttgagcccaggtgttcgagaacagcctgggcaaaaagtgagaccctatgtctataaaaacaaataaacaaaatggcacctaacttttaaaatgctttttcttacatgtaataatgtgagcaaaagcataatttaatttttcctattaaaatgctttttttttggtttctgttacatttctgtatttacttgaattcttagaacactgtttcctgggagatcaaacctggccattctggatacatcagtagtgagagcttagtgcggacatagccttacagaatgtcttctatgttgaaatgcagagaacccgaaggcgcctaggatgagcctcaggcctgctggttgttgcagtggcgcaatctcagctcactgcagcctccgcctcctgggtttaagcgattctcatgcctcagcctcctgagtagctgggattacaggcgctcgtcaccaggcttggctaatttttgttttgttttgctttttccgcctcactctgtcacccaggctagagtacagtggtacgacctcggctcactgcaacctcagccacccggtttcaagcgattctcctgcctcagcctcccgagtagctgggattacaggtgcctgccatcgcgcctggctaatttttgtagtttcagtagagacgaggtttcaccatcctggccaggctggtcttgaactcctgacctcgtgatccacccacctcggcctcccaaagtgctgggattacaggcatgagccaccgcgcacagcctaatttttgtatttttttggggtttttttttatagagtctcactctgtcgcccagactggagtgcaatggcacgatcttggctcactgtaacctccacctcccgggttcaagcaattcttctgcctcagcctcccgagtagctgggattacaggcacccatcaccacgcctagctgattttttgtatatttagtagagacggggtttcgctttgttggccaggttggtctcaaactcctgacctcaggtgattccccgcctcggcctcccaaagcgctggtattacaggtgtgagccaccacacctggccaaatttttgtatttttaatagagctgggttttcacaatgttggccaggctcgtctcaaactcctgacctcagggaatccgcctgcctcggcctcccaaagtgttgggattacaggcgttagccactgcgccaggcttgttgctgaacatttatggctctagaaataattttttttttaaggagaagtaatgacaaacatgatagaaataaaatttgaggatatttctgggttcaaaataaagtaacagttaaatagcgtgaacatgaagaaataaatattttcaggtagaaactccaaaatttaggtagatgctgtgagttttagtcagaatttgaatatgatgtggctgaccatagatacctccattgcattaattctgcttcataaagtgtttgatgcttgcttgtaggtgttgaatagagcctaattagcagtaagtaaacagatctagagcacagactttggcatctgaaggaccttggttcaatgctgggactgccacttactagctatgggatctttggtggatttttaacctttgaaagcctttcatccctcacagatataatggggaagaaaatcgtttccattagtattgtgaggattaaatgattaattgatgtaaacaatgtgctttccatagtacttggcatatcataagtgcttcatgttattttacgctggctgggaagataagttttgctgtggagaatttaagagggatattaaaatatatttttgttattttaaggaaattcgaaatgagtcccatgactatcctcatagagtggccaagtttccagaaaacagaaatcgaaacagatacagagatgtaagcccatgtaagtacttgtgggtttgtgtgcatgtgtattttttggtttgttttaggaggcaggatgtagtgaaaaggagggcttggggtcagtgttgataaatacagtaatttttttcctatttacgtaagacacgttctttaagaatttaaaggtgtagaatagtggaaggaaaaataattacccataattatttcatccttcaaacataggcaccattattttggtgtatttcccacaacctgtttttcttatgcacagttttcctttctttaaaataattgtaattatagatgtctatataatatccatatgtatttccttttcatatcattccatcccctttgtaagttttgcttaaaatagttattggtgtagtttggtttttttccttccccaagttataagagtagtatgtactcgctgtagaaaacttagaaaacagagaagagtataaggaacaaacttatttaaaaataaataataacttgggtttatattctttggagtttttaaaaataaacatgtactttaaacggaaaattagaatcttgccacatactcatttgtagctcttttcttagcagtacattgtaaacttttttttattataaacaatttttaattgctttgacagtggctttggatataccactcttttgcataagttccctgttgttggacatttagattatgatgtatacacacacagacgcacacaattgtgtgaacaattataatactagagttctttggtgtattcatcatcatgcggtgattttattttttgttctgattcatgcagcttattcagatattaaattgggcctccttcgtgcttcagcatatttccctatgtttgactttagtgggctaaacataggttttctctttagggctccctgttggtagggacttgaaaaacagtatcagattgatcacattctggtttttgcttgttactgattgttcgcctgttgactagggtatggtgctgcctgctaagatctcctgtgtaggttgaaccatttcactgttcaaggacacagactgtatacctttatatacattgtagtcattggttatagataagatatttagggtctggatgtaccactgaaaaatccatcagttactggaaaaaaatccttatttttattcttacatgaatagaatgtttttcttatgttgaccaaatacatttccaagaagggtgtattggctgattttgggcaaatcaaatgagaagcagtctctgaaaatctttcatgtttgttataaattactattaaatactatgtttctcttaatgcttttttctttactaccagttagaagtgttcttaaagacaagtagctagaagagtggttttccattttcttcagttgcagcacacttgaagatttgacccacttcctctgaaacaggtggctcatcacggtggcagttccagtgtgggtgtgcgttcagggaatagcgggtgtgggcagtaattctgatacttaggtgcccttcccctgcctccaaatctctgattgagaatcactgagctacagagaataattctctaatgttaccatgagttttgaagacagtattttccagttgtacaccttgctttgatgcctttaattttttaaaaacttttgattttgaaaattgtagatttggatgcagttgagaaataatacagaaagatcgagtatacccctcacctagtttcccccagtggtaacatcttgcataactacagtccaatatcacacctgggaacctgaaacaatacagtccatccaggtttcaccagttttacatgcactcatttgtgtgtgcgtgtaagttctgtgcagttttatcacgtgtagattcctggaatcaccaccacagtctagatgcaaaccagtggagcattcccatcacagggtcacttgcactgcctttctggggccacagtctccttgcttggatcctccttccctaacctggtgttgcctttaatttttatatatttgttgtaattgcaattattggatgcactacactacatttgagtcccctaattagttttatcgaattgatctaaatgggatttttttttttttttttttgagatggtgtctcactctgttacccaggctggagtgcagtggcgtgatcttggcttactgcaaacccctgcctcctggattcaagcgattctcctgcctcagcctcccaagtagctgggattacaggtgtgcaccaccatgcccggcttatttttgtatttttagtagagatggagttgcaccatgttggccaggctggtcttgaactccttacctcaagtgatccgcctgcttcagtctcccaaagtgctgggattacagtcatgagccaccatgcccagctgataattttattttaactggaattgagatgttttattttaaagtaaaaacatttgcaacttaagttatcctcaagtatatacatcaataaaacttatgatttttctcctcagcttttagacttatgttgtatacctgcagttgaaggctgcagggagactctttaaaatatgcgttatcaggcctccctccatcatcattgggaccaggctcttcctgtatgccttctcattgaaaagcacttagccttgagagaaccaagcttccctcctgcggaccatgcagtggttgtcctctggagctgtgctctgctgggagcagcccccagtgcatgttctccttactcttcttcttctttgccccctccctccccacacatgcctccctagtaagccatgttctcctgatctctcagaaagagactgctcattcttgcttctcacgtagccacaggattttctagtctgagccaatatgcttcagcctgcaaatggaaatgatctcttccaaggcttgtgctggccagcacatccccacaccgccttggcacctctcctctcctgacttcagtcattcactgtctttctccttaccctctccttcccaccttcctcatcctgggtgacttcatgtctctgggaaagaactacggctcattgcgctagagttcctagacctgttcagctccgctgacattgacctttagtcatcttcacctctgaaatctgaaactctgctgccttgagggctactttctgtcattccagctttcacttgcttactcccactgtacctgctctttgacttcagcaggatctttagttgactttttcatgtattgtgaagttggaaatgtattgaattgaaatttcgattaaaaaatgtagtgaagcatattactttgtcctctaacctaactattaataactttcttgttgtttttatatttaaaaaataactctggattttttaattccaccattttgtgaagctccaacttaggaaaaatcagtcattcatcctctctgcactttgggcaaatgagcgtgtgccttgggtggactccagtgttaggtgggcttggggttgccttgctgtcctcatgccctcgtctgccccactgccaccgtgttccagctctgcaccgagtaaattatctctcagagctcctcaccatgctcaggatatcgtcctgctttcaattctacagataaaaattgtaaaaatcaggaaacaccaccttagcttcatgttctatcacctggaaactcactttcttttgcccctatccttccctaaagtcccaggagagaagcctcccctccctctgtcctagccgaatccttcgtccccatcctcctcatgggccctgctcttcatcatcactgctttttgtgtgttttcagcctctttctatctcataacttcttctcttttgtataaatatggttcgctctcttttgtctcaacccttatatcctaccccagcccccacttcctttcttacctacatggatggacatttcttacctgtacacaggcttaaaagaatcaatgtgccatttgtctctccaccctccccaccatgcacacttcagcccatgcttcttctccagcctccccactgaaacttattctaaaagcactgtagctgtagttgtcaaatgcaatgagagactttccactggtttccttctctgtgacttttgacattattctcctgcttcagcctcccgagtagctgggattacaggcacgagccatgacgcctggctaatttttgtaattttagtagaaacagggtttcaccatgttggctgggctggtctcgaactcctgatctcaagtgattggcccacctcggcctctcaaagtactaggattacaagtgtgagccactgtgcccagccgaccgtgccttttttcctaaccccgtaatttttctgattttcctctttggcccctcccctattttcagggtgtctcctcctcactttgcctttatttcttcaggagtctgtttctctctccttctcactgtaacacttggatgaatgatctcatctgctgtgggcctagtttccatctctgcttataaccccaaatctcatctgcagtcgtggacttttctgtctacaggtctgtgtatccaagtcatcatctctgtctgggtgtcctgtagccacctcagactcagtatacactgagtgagtgttcctccctgacacacttcactggccttagccccacacctgccttttctccttttccccatgtttataagtggtgccgttatttacacattttctgaagccagaaacagattcttccctcattcatttcccacgtcactaatactaatttccatttccatgatgtattcctatttctttttcttttttctttttttttttttttcaagacagggtctggctctgtcactcaggctggagtgcagtggcaccgtctcggctcactgcaacctccgcctcccaggctcaggtgatcctcccacctcagcctcctgagtagctgggactacaggtgcatgccaccatgctgagctagttttttagattttttgtagagatggggtttcgtcatgttgcccaggctggtctcaaactcctggactcatgtagtccacctgcctcgacctcctgatgtgttgggattacaggtgtgaggcaccgtgctcagcctccgtaatgtatttcaaatctgttttcttctctgttcacattggcttggttcaggccctactacgcttttcctcgtcattacagtagcctccaaacccatctccttgtttcccttctgttcccacttcagtccattttcatggtatctggagtaatctttgtataatgcaagtgtgttttccactctcctctctaatagtgctgcacaatttttatgaaaaagttaaacttctttagcattatcatactgggctttttggagattgacccctttacacacctctctaaatcttttctacccattttcctagaaattattcatttcagtaaaactgaatcacttggagttcttctagcgtgactggtttttaatacctcagtggcttcaaatatgtcattccctttttgaaatattcttcccctcctctctctgacccatctcaatcaaagttctccttctgcaaataccagctcaacaacctctttcccgtgagtggtattctcatccagtggaggtggtggttctcgttcactaagtccagaggggctcaggaatgtgtattttttaaaagctgggatggtgttgctgtaccttttccaactgatagtcattatgtaatttaaaaatgtgtttctggctgggtgctgtggctcatgcttataatcccaacactttggaaagctgaggtaggaggattgcttaaggccaggagtttgagaccagcctgggcaacatctctacacagaacttttttttaattagctgggacgtggtgatgcatgcctgtagtcccagctatttgggaggctggggcaggaggatcacttgagaccactaattcaaagctgcagtgagttgcaatggcaccagtgcactccagcttgggtgacagagcaagactgtctctaaaaaattttttaaatgcatttctatacatagtacttgacagttgctgatttggttcagaaaacatttgttgaaaaccagctacatgtttgatactatgctatgtatcgaataatttatggtatacttgaggagattaacacataagcatgttacagatattgtaagatatgacagtgcattgatggagctgagaagaggctctgcccaaggaggcagggatggcttttaagaaaaagaatggtagcctgaactaggtaaataaaggggaatggaaaaagaattttttaaaaattcagagtcccagatctttcttttctagatttggattcagccggtctggaaatgtttatttttaaacaatcttaacatgattcttttacactcactatggcaccactcctcagactgacatatggaaactacatttggagttctgaatacgagaaacataaaggaaaaaggatattttaaattaggaagaatttgggctgggtgcagcagctcatgattgtagtcccaacgctttgggaggccgaggagggaggatcgcttgagcccaggaatttgagactacagtgagctgtgattgtgccactgcactccagcctgagcaatgtgagaccttgtctcaaaaaaggaagaaaattgaaaggatttgaagaggtccataatctgctacaacctagagatgcctcagttgtctcagttaactgtgagacattgtagaagagatggacaagaacttcgttgtttgaaaagagagtagcttgtaatggttactttgggaaacgtctttatactattagagactaccaccaaattttgagatcttcctatttgcagtacaggtagaaatcccagtttactatttggtctaaaagggagtgccagcaattgagtcaactgtcatgtcttttcactggccatgaaacaatctgtgtgtgtgtgtgtgtgtgtgtgtgtgtgtgtgtgtgttaaaaacccataccataaatttcttgtaggtgtatattaacagtattgttaactgtatgcacattgttgtacaatagatttctggaacttttccatcttgtataactgaaactctaaatccattgaaaaactccctatcttcctcttcccccagcccctggcagccagcattctgctttctgtttctatgagtttgattactttagacactaaatatatgtgtaatcatgcagtatttgtctttctgcgactggtttatttcatttgacatactgtcttcaaggttcatccatgtgaaacagtcagattttaaaggaaattaacacagagactcatgattctggtagtgtcaggttacatagtccatggtttgttgctctacaaaacaaaaagattctcaaataaacatactttttaaatgagttactagagggggaagaaggaagggaaaacttctatgctttcggcacgctccctgcatgatcttagcaaatggcataactactttgaatgcagatgtcagtatcagctctgagatttgtatgcagctaataaagtagccccaagatgtattaagcaaaaatgaatagaattttggggagaaattgacaaatccatgttcatgggcttcttaataagacaagatatttgtaaagaaatagatttatataatattattcttttttctttttttttttttttttttgagacggagtctcgctctgtcgcccaggccggactgcggactgcagtggcgcaatctcggctcactgcaagctccgcctcccgggttcacgccattctcctgcctcagcctcccgagtagctgggactacaggcgcccgccaccgcgcccggctaattttttgtatttttagtagagacggggtttcaccttgttagccaggatggtctcgatctcctgacctcatgatccacccgcctcggcctcccaaagtgctgggattacaggcgtgagccaccgcgcccggcctatataatattattaaccttaatataagaagaaaaatacatagaaccctatatccagcaattagaaaatgcacatttttctaggactgacatggtctatttgtaaaaaatggaccattgactaggctgtcaagtaaatcttaaaatttaagaatgcctggctgggcgctgtggctcacgcctgtaatcccagcactttgggaggcctaggtgggtggatcacctgaggtcgggagtttgagaccagcctgaccaacatggagaaacctcgtctctactaaaaatacaaagattagccaggcatagtggtgcatgcctgtaatctcagctactcaggaggctgaggcaggagaattgcttgaatccgggaggcagaggttgcggtgagccaagattgtgccactgcactccagcctgggcaacgagagcgaaactctgtctcaaaaaaaaaaaattcctatcttatagctcataattttttatcttaatgcaattaaaatataggttattaataaaaagataaacatttccataaatttggaagttttaacatttctaaatcgtgggtcaagacaaaattataatggaaacttaaaaataaacaatatataaaatactgcttatcaaaacttgtgtaaaggagctaaaacagtactgcaatgaaaatatattgtcttaaatatttatattatattttatttattattttttagatggagtcttgctctgttgcctaggctggagtgcaggggtgtgatctcagctcactgcagcctctgcctctcgagttcaagcaattctcctgcctcagcccctcgagtagctgggagtacaggcacgtgccaccaggcctggctaattttgtgttttttagtagagacagtttcactgtgttggccaggctggtctcaaactcctgaccttaagtgatctgcctgcctcggccttccaaagtgctaggattacaggcatgagccactgtgcctagcccagtattttaagatgaaagttaaaattaatgtgctgtctaacctaatttagagtaaaaataagagaatgagaaaaaaaaagcagaaagaagtaacaacaacaaaggagcagaaatagaaatcacagttacagcacaagggaccaactaaactaaatgttagcctcggtaagactgatcaactctgtcaagatcgagcacgatcaatcaaacaagaaagaaagaaggtgcatataaacaatatcaggagaaagagtgggcacataaatacaggtatacaaagaaagcgtgaattgaatactgccaacaattttatggcagtaaatatgattttttagaaaaaatggaacagattcctagaaaaacataatttaccaaaactgactcaagcagaagtagagtctgaagagtccacttaaagacattaataaacaaaatccacaaagaaaacactgggccagctggttttaccggtatgtttcataataatgcaagtgaatatagatgtagaaatcctaacaaaggattagcaaactgaatatagcaatgtattaaaaagataatacattatgttcacattaagtttatttcaggaatgtaagggtagctaacattagaataccttttttattttttatttatttattttttgagacagggtttcgctcttgttgcttaggctggagtgcggtggcacgatcttggctcactgcaacctccacctcccgggttcaagcaattctcctgcctcagcctcccaagtagtttgtattacaggcgttagccgccatgtctggctaatttttgtattttcagtagagatggggtttcaccatgtttgtcaggctggtctcgagctcctgacctcaggtgatccatctgcctcggcctcccaaagtgctgggattacaggcgtgagcttctgcacccggcctagattattttataattcaccacagtaacaaaggagaaagagccatatgattatctcaataagtgtggaaagattatttaaagtccttgctgaggattaaaaatgacacatagcaagctagaaatagaagggaacttctaagatttctaagagataactgcaacaacatcactcataatgatgacatgatgaaagcattgttttaaaaaaatattgggaacaaggtaagtgtgttcattcttaccacttatacttaacattatacttctgtctccctgaccttatactctaggtcctagttagtacagtaagcaagaatgagaaataaaagccataaggattggaaagaaataaattaactgtcttttaatctgtttatgaggccactatagaactttcatagccaaagcaggaaggttcagtaagaggaataaaagtataaaagttttatctgttgctatataacaaaccaccccaaaacagtggcttaaaacaataggagacatttattatgttcacaaatctaggggttgactaaccccacataggtgattcttgctcaaggtcttttgtgtaattgcatttcaaatgggggctggggctggagtcaccttgaagaagcaacttctttactcttgttgactgtgacctcaactgggctgtcaccaggaacacctacacaaggcatctctatgagacctggactttatcacaaggcaactgagtttcaagagtgagcattcttagagagcaaggcagaagcttcattgccttttgtgacctagccttagaagtcacatacaacttccacaacattccgtttgagaagtaactcactaaggccatgcatgttcaaggagagggtacttaatactcttattagtttgatggaggaagtatcagtgaattgtggacatattttaaaaccatcaccactatagatgatacgaattgcttcgtagataacccctctagaaatgtgcagacaagtcaaagaattattaagaaacattttgatagtcttagaattataagatgatagaccttcaaatcattaaaaagaaacctttaaacttaccagaaagtgcttgtcatctttcttagtaatagcagatttagataaaaacttagttctataataataatccgaataagtatagatttaagttaaattttatggtaactattatgtaaatatttgctaacattttttcttatcccattaaagtttgaaaataaagaccagatgtcagtgtagtgctttaccttctcaaaatccgttgttgacagcttttttactaaaagattttctcactcactgttagggtctttagttctatcttcaattttttttttttttttttaaatattcagttttggcctagtgcagtggcttatgcctgtaatcccagcactttaggaggcagaggtgggtggatcacctgaggtcaacatggtgaaaccccgtctctactaaaaatacaaaattagttgggcgtggtggctggcatctgtaatcccagctacttgggaggctgaggcaggagaattgtttgaacctgggaggtggaggtgacagtgagccgagattgcgccattgcattccagcctgggcaacaagagcgaaaaaaaactccctctcaaaaaaaaaaaaaaaaatctttaattttaatcaaagccaaatcaaagctatttatgatgttaataatttattcctgcgggctattgatgcactggagtggttccaaggaagaagaactagaactcttagagaagaagctagcattgattagacagggaaagagaaaacctaaacagagcagcatgatagctgactttagatacctgaacttttacatggaaaaaagagttctttatcctgtgttaagcccaaaatatagaactagggttcatgagcgaataatagcactggtgaatatcaggttagcattagctcttaagagctgttttaaacctacaaacgaaccctctgaactagtacacttgttattggaggtattcacgcagagggtggatcttctcactgtcagatcttctagagaatatttgtgaatgaattatagagggttgcattagattactttggtctatttcttgtatgcttcatttcttgcccctgttcatctctttctcaccaatttcccgcattcacctttctgtcctattacattgtgaattccttaacagatgaaactttttttttttttggactgacaaaaatcttgtacatagttttgtcatagggtagtaaagagagtattaaagatatcattaagtttctctttctctgtccctgaataattaaatctataaagcacttggggttgggcccacatgtggaaggcatgtgagtaaaggtggtaatgtccttgaaaaagaagcctgtaatattgggttagcattgctgtatccaggtatgaatgcatggttttcagtgagtatagatacacagataaatatgaacataggtatgtgtatatacctatatttcttatccctgtccactgggaaatcttgagagcagcgatagctgatgagccattgggcatgcttagcttttgataccaaattttattctccactaggaggagaatagagctttggagaaatggctggttccacgtctgcgacagggaaagtgtaagaatagcctggaatgtcttgtagtgacagaacataaagacatgcccaaaaaatgatgaagacatatcagaaggatgtagaagccaagctgagtccactggccaaacctgggataatctgagcatgaaaataaataatggttacaacctattgaataaaataggaattaatgtgtctatactgatgtaaagaaacaaatgaatacataaatgagggatagggaaagttctacctttgtataggttgccaactaataaatattgaaatggatactaaagttggtgggtgaaaatttggtgaagaacaaggtatttacataatcttgaagtatccctttacaaaatacttattaaatataagaagaggaatagtacctctacactggagaagtctggccaacaccagccttaaatatgtggtcatgaccagtcatgagatataccatgtcagaatcctgaaccacccgataagatgcagtgaatacttagcatctttctgagatgaacatgccaaaaatatacaaactgaactcatctatagggaaatagatatctgacaactcaaatggaggaacactataaaacaactgacttacagtttcaaaaggttaaaaaataccgtgaaagaacagattgtatccttttgtttaaaggacattattgggacagttggtagaacttgaatggtgtctgggttagtaaagtatcactgttaattttataatttcgatggctatactatgagtaagtaggattatgtcattgtagaagataaaaaaatggaataatcaggtatgtttgcaacttgctgtcatgacttgggaagaaaattctttgtgcttggaatttttctgtaagttttaaaattatttaaacatacaaattaaaaatacatataaacttgaggtactgaatcctagccagtacatgaagtcaagaaaaggaaataaaaggcatacaggttggaagggaagaaataaaaatgaccttattagcagatgacatgtagaagattgcaaagaatctacccaacaatgtcctagaactaataagtgagttaaacgaggttgtgggatacaaggtcagcatacagaagccaattgtattcctgtatattaacaacaaacacgtggaaaccaagattaaaaacacattgttgtttacagttgctctaagaaaatggaatatgttggaataaatctaacaaaatacatataggatctgtatgttgaaagcaccaaacacatggataaaagaaatcaaaagatgacctaaataaatgaaaaaggcctaccatgttcatggattggaagacttagcatagtgaatcagtcctccccaaattgttctatagatctatagtgactcatagtgtcaaattgttcctaaagatctaacacaatttctgtcagaatttcaggaagtttttttgtagataaaaacaagcttattcttttatgtggaaaggcaaaggaactaaaataaaatggctaaaatgatcttggaaaataaaaactagaagaatcactctacctagttttaaaacttaatgcataaccacagtaatcaaaacagtgtggtagtggcagagggataaatacataagtcagtggaacataatctagaaatagacttgtaaaaatatggtgaactgattttttgacaaaggtgcaaagcaatttaaaatgaaatctcacaccttacacaaaagttaactgaagatagatcatagatggatcataatgtaaaagctttcataagaaaatgggagaaaattcaggatgtaaggctagatgaagagttcttagctatgacacctagagcacaattcatttaaaatatcaataatttatactaaatcgaaataaaaaacttctgctcctcaaaacaccctgttaagaggacaaaaagatgagtacagacttggagaaaatgtaaaccacatatctgacaaagaacttagatctggactatatatagaactctcaaaatgtaacagtaaaaagaaacaaaaaccccagttaggaaatgggcaaaagatatgacacagatggcagataagcctatgaacatataaaaaacttcattagccattaggaaaatgcaaattaaaatcatggtggtgggatgtcactagacgcctactaaaacagctaaagtaaagagatcacaataccctaaaaatgcagagaagctggatctcatatatgggtggtgggaatgtaaactggtatagccactctggaaaatagtttggcagtttcttaaaaagctgaacgtatacttagcttatatgacccagcacttgcactcctgggcatttatcccagagaaatgcagtcataatgtccacacaaaagtgtgtgcatgaatattcacagcagctttatctgtagtagccccagattcgaaacaacccacatgtccttcagtgggtaagtggttaactatggtatattcataacacagaatactactcagcaataaaaaggaagaaacttgacgtaacaacatgggtagctctcagaggacttacgctgggtgaaaacaatccagtttccaatgatgacatagtacatgattccatttatataacattcttgaaatgatgagaattctcgagagggagagcagatcggtggttaggggtggaatggggaagagtgtgcctgccaaggggcacacagaacctttgtgctgatggaataggtatgtgttgttttggtcatgtgaatttgtttgtggtaaaatggcatagaactgagcacacacaaatgagtgcctgtagaactggagaaatcaaaataaggtctgtggattgtagcagtgtcttttcatgcttctgagtttgatggccttctggaactaggccctggacagcgcattgctaggagtggggctctgtggtgagtctgacagcgtccctggctgcaaagagcttaactgtggcaagaaggctgctactgggtgcctgggtgctcctgctgccctccaccagcggagctgatcagaatcttgccctaagaggcccctcttaaaagccacagcaccttgggtgggctggtctgccctagagcacttacgctgggtggagggagctgtggaagcgtgcagtgggggagtgctggagtccaggacagtcagctgtactcgggattggggtgagggtgtggttgtttctagattaaaatacagatacatgatcaagtagaattctgaaattcctttaaatgtttaaggtaaaataggaattaccaaggaattttgtactttaataccctcttagggtattaaggagggtttgtcagtgaaaataatcaagaaggactggtccattcgagccactgattttgacagacaagaaaacagacccctgagtgccccttatcataggactgtcggcgactgggatgctgatagtgtttctcaagtagtagtcacccttttctgggaaatcatgactacgtctggaatcatgtaggttggtagagccaaaagagagatcagaatccacatctttagatccctcaaactcccctcacccatgtttttcatctgcgtcgcaaaattccaggtacctgtactaagaagtcctgaaggtttctgcgcttttcctttctgccgaattagtttacgcttaagaaagtcagttaacgtcatttcatttcctgcttatggttcagaatgggttgatagtgatttgtcattctaacaaaattctagcaggtgtaggaatttgaatatgtgaaaatcttctggaattcatcatataaacaatgtttgaatacttgctgacttaaattgttatgacactctactaggtaggcccgctgagaaaatggaagtagcagtcctttttccctgacagtcaaatttaggagaaatgaatcagtacaggatttcttgactctccgaacctaaactgcagactgctcctctccgctttgtccccgtggctccagccacattcttcatgtccctcagacatgttaggtatgtaccaccttaagtcattcgccgttctctgtgcttggaacactgttaactaaaatatccgtgagactgaccccttccacatctgtgcttacatgtgacccacctgggtggtcagccacaaggcccatcctgaccaccctgtttagaattgcaacctgcccctctccccagcgctgtgagtcccgttactcttttttcttagcatttattactcatatactttacttagttatgcttattgctatatcaccaatatagatatttggtccgcattgtttgcatggtgtctcatgggcctttggatgtgatgaaagttaaatcttttcccctaagtccctccaccttcaatttgtttaggctctaactctcctagaagcggagagtctgagtttcaaagaaaatggtgcaatactgctgagcgccgtggctcactcctgtaatcccaacactttgggaggccgaggcaggtggatcacctgaggtcgagagttcaagaccagcctgaccaacatggagaaaccccgtctctgctaaaaatacaaaattagctgggcgtggtggcacatgcctgtaatcccagctactcaggaggctgaggcaggagaattgcttgaacccaggaggtggaggttgtggtgaactgagatcgcaccattgcactccagcctgggcaacaagagcgaaactccatctcaaaaaaaaaaaaaaatggtgagatacttactgattattttaaagtgaagattagtatgtcttattttatacaagctaccaaagaggaaaaatgtctgttttccaaactaatgaattttacctattttgtaaagacatttctcaggtattcttttcattgcagactcttggggacagattaaagaggactttttcaattaggagatttgtggaatcagaatttaattagtgacattgtcctgtcaagtttaggatcttgaaatcatgatgggttgaaagacgctgatgatttcaaggacagtaaactattgtttggaaaaggttgaacttaccaaatgtttcctaaacaatgtatactttattagcaaagctgtgatggtgctaccttggaaatactctttacattcccaccgccactacttgattcaggcctcatcaccttttgattacgctttcagtgtattggtgtatgaagttgccttcttcttggttcagtccatcttctatgctgctgagagttattttcatgaaaatcaaatgtgtttataccagtcctttaaagaacttcactggggccctgtccagagcctgtgcctgtagcacggcccacgtgcccttcagggtccgcccttaatgtgtctggggagccctctctagccagctcgccagcctttctgaatctgccagtcctgccgctacaccattccctttcattcctctttatgatgtgccctctgctggaatttccccttcctgctgatctcactaggcctattcaggtagcaactactcaagctccttcccacaatattttatgcaataaagtatcagtactcagagtcacggcttaatataatttcttttttcctttttaaaagcttcaaacaaataatgtcttacctttagatccctataggttaaaatatgtttgttgactaaaaattgtgtatgattgctgaaagtattcaatgcagggaacagaccagttcatcatggaggcattccatcagagcgtctagttagagaagatatgtcatggactgcatcggcacagaagtggggtttatgtgagagaggagttggaagtcacacctgagtggagagcaacgtgaaaaggtgatgtcagcaagaatttaggatgtatggaaaggatggtaaaggcaccaactggatggatcagggagacatggaatgcagaatgcaggaaataggtaatctcttaaattgcacaaatctaggtttcatttttgtgctctagtgtgttacacttgtgatgacttgacttccctgagtgacagtgcgatgggtgtgatccatattcatatgcacttcatagggctgtgaggactgagagaggtgacccagtgacgagtgtcacacaaacctgacatgtcgtaggcaccaaatggttctagacagtggttctggttggttttgtggtcaattggaaacctttcatcaagtagaattttctttgcagagcaaacaattgaaatgttaatattctatgtgtactaaagtttgtattctccattaatatgggggagtatatggtgacctggtgtttagtgccagctttgtttttggttcattgctcgatttatgagagagaatgcataatatttgttgttcgactattttacttgcaggattgaagagagttgacaaatctagaaaatgctttgagttcttggacatcactgtttgaaaacgtactgattacccttagttgagaatgggaaaatctaaaggggaaaagtcactggttcacgctgtactattagaattggtcatcttcttgcctgacttgtaagttaaggatgcttgatctttgctgtgatttaacctgttcaggatgaattgtaaccagttacaatgaatacaaattctcctttctgtttgacctggaaaactttccaaaaggagatgtctttacaataatgatatatttggtgaaagctgtgggttgtttttttttttttaaagcttatgatgacagtattgaaagaggaaactaatctgtattgtcagcacagccacagctagcactagtcatttcttgagaggtggagctgtttctcagaaaacatgctgtttgagggtaggaggtgaagggactccttgtcagaaattggcttaattttaatccaagttataaaccacagttctgtttgggtattgcatttcttcatttactcagtgacaagaattaaggcagatgatgcctgtagaaaaaaaagtgtatgttcttgatagttctgctactagtgctagtagaggttgagaaataagatttcctgtgaagtgtggtttggttgcttttgtggtatcccatgcaaaagagtttgaactatcttcatttttctccctttactggatcctttaaaagaggaaagggtgagataaccagacttacaaggatggtaaagtatagtgggctttggggcttacttatacagcccaaaggttatgggatgctgctgttatgataatctcatgtcagaggttcctatggaagaggagaaaggatgtacctttctgtgtgttctcattcagaagtcaaaagtttgttttttaatgattagtttacagatttggggctgactgatagtatctgggcagggaaaagagacctgtgactcaggttgttaagggaacctgtgtatatgctctcacaaactcgaaaccgtgtgttgtgatccttaattggagaagaggtagtgcccttctttgttatcatcactaaagagtataaattataaagtcacagtttctcataaagaggctttgatagtttcacttcctgaaatgtgtatattcacaatcttttgcaatagttattttaaggtgatgtgttttatttttttctctactgcctcttcgaaatcaaaaagttatatatactttttattttatattaatctttttcaatttttgtttttataattttaatgtattttaaatttattttaaagttttatttctcctttttgctttaatatttcttcctttttaaattgtttttcatttttcctttgtatgtgtttttcttaaaagaacagaagaattaaaataatatctagtgatgtaggtatttcagttttgtttttaatcagccttgagaagaaaatacaggctcaaataacatttgtagtcagttctaaatagctatagagttttcccaaggattacctttcttttttagtattatctgataacaaaataaaaaaaaattttcctgagaaaattcaccgttcctttgcttttgttgactctgtatattaatgttaaacaggaagcgaggccactgccaggggctgagccctgcagacccagtgccctgcaggtagtgccctcctccctactgcctcccaggactggatctgggcttttctggtgtgtggttactgtgcttatagagcattgaggtaacacctcgtgcatattttacagatagaaggaaaatagcagtgaattttagttcagagtcctgagggtgaggtatcaaatactctggctgaaggtctttctctaggtttacttcctgcatagctgggcaagggtgtggggtggtgccatgtggggtaaccagattcccagcaccctgtgaggtggaccttcccgggttttatggattcctaccgcatgttagctaaatggctgttttcagttgtgcaatagatatgagtagcctttggttagtgttctttctgtgattacaacatgaggaaatacattcctttggtgtgatattttagtggaactttaattttaaaatcatgtagttttctaaaaccaggctttctttttttggtatgttgtctaggagatatgtggtctttattttaattaagttgctgacctttttactattttacataatataacagttaaagggtgattaaactgttttttaaaaaagtgatttttaaaaaaaagtgcttgttgacatcatctttctgagaacactagtatatgtgatttactataacaagatcttagtttttcctgttggcaaatgacatgtaatatttacagaggtcttgggttcagtccagcagaaacatctcagataaattgatgtgtgaaactaaagccattttacattttctttcatatggagataatataaacagttttttcatttaaaagtaaggagagactggctatttagtatggatttctttgagagggacaacttgtaatagtatgcattctctagagttaaacatcaaacaccatgtttttagttttataattcagtgatatgcatccggcagttgtgtgttgaggattctgagttaattcatgggctttttctcctggtgtcatgcttctcttgctttcccatctaaatgtataaggtcacattttgtatttcacatatttaaattagcataaattctcaatctatgagatttttacttttaaaaactagaaatatctctaaactgttaacagagtctaagtagtgaagtatcttcagtggtcttttaaagaatacagttggaatattccaactgtctttaaatattttcagcatttaacctaaacacagttcagtgctaaaatttatttaaatatagtggaattcttatctgttgagaaatgaagaggttgaaatatagtaacctcggaaatctagtctcatctatttgagaccagttatcgttttgtaggtagaccaatcaattcttaggtaccaagaatctgaatgatccttttacttttaggaaggtaagtactttattcatttaactatgtttactcctggtcgatttttcaagtcacaatggctaatgtgctacaaacagaagtgcttcctttccagcactatagtaataaacaagattgcattttatactccttacaaaaaaagtagagaatagtttaggatttgtctcaactctattatgatgctaattcatttttcttatttcttctgtctttttataaatacctagaatattaatatgaagataaaaacagtaattttgaaatgacagttgtggtttatcattctctattttcagatgatcacagtcgtgttaaactgcaaaatgctgagaatgattatattaatgccagtttagttgacatagaagaggcacaaaggagttacatcttaacacaggcaagtaatacgataccacgcaaatgtctgaaaatgatgtgtttgtgcttgttctgctttaaatcataggtaaaagtatatcttgacttcttttggaaatgaaatggtatttcagtttttttctgacgatgtaatgaattatggacattataaggttttgaagctttgagtatttaagataaaaggcaagttatttttgatattacacgttctgtgaaggaaaattcttaggaaatggcttaggccagttctttggcagattgtgttccttacattatatctgacacagagtgctgcttatgcttcttagtgtcttcttttctcttcccataccctgtggcaaaaccagaggccctggacagctcttctgtagctccccctgcctcgcatatatcttcagagagtacaccaagccctggatggtgtctggtcgtcttcaaggacctgagcgggtgctgagaccaggtgctccagaggcccagccacaaggccttgtgctccctgtggccttctgcccagttgcctctgagcgcatcagccacacctgtgtgcaagcatgattcttccttccattctgagatagtaggagagatttttgtgtatccacagctactctttattcatcaagtaataaagacttgattatcaacagggctgtctttccccctaaagatttttaaatattcaaaagatataccataatatttgagatttttgaaaacataacttaaatcagaatgacttatttgaaagagaaaaatatttgataagtaaaaagatatgcagattaatgtaactatgagctattatactacgtcaattcacaggaaactaaaatgcattttttacttgaggtagtacagctcctgcaagtcaaaaagaaaaaaaacagcccatggaaaaaactggcaaaggacataaactcctagttcaaagaatcaaaggtggacactttgcacatgaagaaatgctccattcagtaaccagggaatgggcctttcacctgtcagaaaaggagagatttcaaagtgtataatactcagtgttcaaatactctgaccgaccaagaaagtctacttagagaaatacagtcagacataaagatatatgtgatcggccaggcgcggaggctcacacctgtaatcccagcactttgggaggctgaggcagatggatcacctgagatcaggagtttgagaccagcctggccaacacggtgaaaccccatctctactaaaaatacaaaaattagctgggcatggtggcgggtacctataatcccagctacccaggagtctgaggcaggagaatcgcttgaacccgggaggtggaggtggcagtgaggcaagatagtgccactgcactccagcctgagcgaaagagcaaaactgtccaaaaaaaaaaaaaagacatatgtgatcatgttcattgcagtcttattttaacgcatcagactcaagcaatctgtaagggactggttaaataagttaatcatacatataccattagtaataatttgtggagcttgggaatagagactttaattttccattttattcctttctgtaatattggaagttttttttatgtgcatttgtattttaaactactatttagagttaaaaattttattttctgtttgaaatacctatagttgacccttgaaccatccagggttgaactgtactagtccacttacaggcaaatttttttcaaccaaaaacgggtcggaaatacggtattcatgggatgtgaaatccatgcatacagagggctgactctttgtatctgcaggttctacagggccaccagtggggcttggacatgtgtggattttggtatactgcagtgggtggggggcaggttgggtcctggagccagtcccttgtgtatattgagggacaactaattacattaaaaaatagagaagaattaccaccctagatcccttatcacaaccctttctccctctgtactgttcttctccattatcacttactggttttttgttctcttcttagttcttaaaaacataggtcttaagattctaaattagcttttttttttctcctccagtctgcactacagccctttaagaccatggttttcaacctttgtaacctaagatagggtagactactgtcatggtacctgtgctggaatcttggtgccagcatttcactgggtattcactcacccagcaaagacttactgagacctactctgtggcaggcattgtttaaataaaacagactttcataaaaaccctattatgaattttatgaattttacattataataggaaataataacagttaaaaattttgtaatggtgtttttacatgctttgtataatttaaaccttaggacaaccctctgtggtaaatagtattacctttattttatacacgaggaatctaaggagatccagagacattaaataactttctttttttttttttttgagatggagtctcactctgttgcccagcctggagtgcagtgatgcaatctcagctcactacaacctcctcctcccgggttcaagtgattctcgtgcttcagcctcccaagtagctgggattacaggtgctcaccaccactcccagctaatttctgtatttttagtagagacaaggtttcaccatgttgctcaggctggtctcaaactcctggcctcagatgatccacctgtcttggcctcccaaagtgctgggattacaggggtgagccaccgtgcccagcctcctagtaattgtttttgaacttcttgtcgctgtgtgtgtcctgaaggagccctgcccatttaatgcgagaactcagaagcctgtgtctggctttttcttctctcctgaattcctctctatgtttttcaggtctctattggatatttttactggatttcaaagtctgcatgttctctgtcttttttaccaaggtagctgccttcctatttttctcattgggattgagactgtcctcattgtctgccaagttctttctgatcttctattgcccctcgcttttttcagagctctcttcaattacacctgtcctgttgcagcagctttttaaggtctccccttggcaccatccctgtcactctagtggtgtagtcaccaactacatccctccacttctacctcactgatctatttgtcttttcccaaatatgccctaaactttcatgcactttgccttatgcttggagggcctggagtggaccctaactccctcccattcttctgcattccctctctgtattaggacctttttcgaggctcttctgtagtttccttcccagcctttcctgctccctaagacctgatggtttaatttgcccatactcttgtactacttaactgtgtccattagtcatacaagtacttctccttctacctttgcaagctcttaaagagccaagactgcatctcagtctagctcttggccttgcatctagcaggttgtttggaatggaggatacagaaaactagagatgcagtaacccagctcttctgattgtcctttgtagattgttacttcagtcatctttttcttctgagttttatgaattagtatttttttaaaagtcacctccttggtgtattatgtctgttttgcagatgaagaacattggtagcattgctggtaaatggaagagctgagatgtgaatctctgttcctctgatttaaaaacctatggctgggcgtagtggctcaacgcctgtaatcccagcacttggggaggctgaggcaggcagatcacctgaggtcaggagtttgagaccagcctggccaacatggtaaaaccccgtctctactaaaaatacaaaaatcagcctggcatggtggtgcacgcctgtaatcccaactactcaggaggctgagggagggagaattgcttgaatccaggaggcagaggttgcagtgagccgaggtcgtgccattgcactccagcctgggcaacagagcaagactccagctgtgttcctgtttattatttagtctttagaatcaccagtggaatggcatgggttgtgattgtgtgtatacactaaggagtaacctcactggcaaattgctacatccattttttttttcctaattaaagaaaaaggtattcattttactggggatttcctcattgctgtttttacctttagactgtgttttgttttagaagtagatcaagtaatagaaaaataagttgagtgaggaaaacgccactctcaaatattaggttgtagtttgtcaggatcctcagtagacttctagcatttttacaacttaaccttggtttattcatttaagtaatatttattgagtatctgctacataccaaggagtacaccaggcctaaagatgcttttagtcagctgggcaccatggctgatacctgtaatcccagcactttgggaggctgaggcaggtggatcacttgaggtcaggagttcgagaccaacctggccaacatggtgaaaccctgtctctactaaaaatccaaaatttagccaggtgtggtggcgggtgcctataattccagctccgtgggaggcttaggcaggagaatctcttgaacctgggaagtggaggttgcagtgagctgagatcgtgacactgcactctagcccgggtgacagagacaccatctcaaaaaataaaaaatgcttttagtctagaaccactttaacccccttgttgtatgtgggtctgaagctctgggcagccctagcccccactcctgactctgcccctaactcataccactctgctacattccatgtgagttgaatgcatgttcatagttattttaggtgtagcaaaactacatctcattttaaccttctcatttaaaactcgttaaaatttgtacataggcttttcatctcttattagatcttccttttgccctatgctatcattaaaatgtgaaagcaattggaaatacatgaaatattttgcttttatccccatggcattgttgtaacatggactgttgcccctttttaactctgcccaatactcttccattgaggccgtacatactgtgcatttgtagattaacagtttcattgtggttcaggtactttaatgattcctactttttctagaaatctttttgtagttgacttgagttggttggctggccagtgatggtacagacttttttctcatggattttctatgatgtgtgggaggcacatcctcttggctgtagaagatgaagaggacagaaatttccttggtctaccttctttgcagctagaacatgatcagtcagatactcctactcgtgattttgtctctgatttgcctatagattgtacatgaatactatagccaccttcatatggcagtgccagcaaaagcaaggagatagtagtgacggtatcaagagcagcatcccaggttgactttctttggggcaggaccttgcttgtgtcttaacccttggttcctacccaagtttgtctctctagtcctcaactctgaaagccacttgatatcttacacaattccttttttgcctgagaaaataaaagtcagttttgatcatttacaaccaaaaatcctaactaacacagacctgtttttgaaatcaggtagattggaagtcttggtttacttcttataagcccgtccgctgtctgtcttgtaacatcccaggagcagacttaacaaggccttcctggagccttgctctttctgtctgcttccctcatctgctctctctcctctctcttcacagggtccacttcctaacacatgctgccatttctggcttatggtttggcagcagaagaccaaagcagttgtcatgctgaaccgcattgtggagaaagaatcggtgagtaatatttaatatttacaacttagtatactgtatgtgatcattagcatataaagattttcattttggggccaatattcattccttagttttggcctttaattgctaaaggctagcggtcaaagtgtttctgtccggaaaaactcatgtatccttttcctttcttaagtatttttataacaattgcagacctttcatctccaagatagaaatacaatggaataaatatggactagcagtgacatatagatctttggaatccctaggaatccttattgacctattgtcaataagtcctcttccagctttaagatcttgtactgttctacttcagatttcttactttattctacatttcataattgctggtttttaatgatgatgaaaatttcctaatccacttctaattagatgtggcaatgacatgccagaatttccagcagtatcagcatagtcatttacaggggtttttcctgatcttcaatatcatttaaaaattaaggattaggccaggcacggtgcctcaaacctgtaatcccagcactttgggaggccgaggcaggcagatcacttgaggtcaggagtttgagaccagcctggccaacatggtgaaaccccgtctctactaaaaatacaaaattagccaggtgtaatgctagctacttgggaggctgaggcaggagaaccgcttgaacctaggaggtggaggttgcagtgagccgagattgtgccactgcacctcaacctggatgatagaatgagactccatctcaaaacccactgcactgcagcctgggcggtagagtgagactccatctcaaaaaagaaaaaaaaaaaaatcaaggattatgacattgtcagtttgagcaccattgtagactacatgatttgcaaattttatttctctcattttggagtataattactgtattaataagataacactgccaccagaatttagaaatcatgtttatggtggttgaacctagatggttaacaagagtcaggtttaattattttggggaagattacttcagaggtggtgggtaatgtgttattcatcaagagacccataatgtctgattattgttctttttatttcattaatagccattattggtcagtgttcagcttcttaattcattatgggttacaaatgatgataatccaattctgtcattacttctcttaaaagcagttttccaaaaaaaagttgattccctattgaggtcatctgttctcaacagatgaccaattaggagtttttctggtggagagtggcaggagaggttgaattattatgggtttggacatactggattaattttactcctttgcagttattttccttatttttgatcaaattaccctgtcattggctagcagcaatgtctttaggttgggtcctgagtcctctttttttttttttttttttggagacagagtctcgcctgttgcccaggctggagtgcagtggcatgatttcagctcactgcagcctccacttcccgggttcaagagattctcccgtctcagcctcccgagcaactgggattacaagcacccaccaccatgcccagctagtttttgtagagatggttttaccatgttggccaggctggtctcaagttcctgacctcaagtgatacgcccacctcggcctcccaaagtgctgggattacaggcgtgagccacctcacccagctctgagtcctttttaacaaacctttaatagtttccttggctgggtgcagtggctcacacctgtaatctcagcactttggggagctgagttgggtggatcgcttgagcccaggagtttgagaccagcctgggcaacatggtgaaactctgtctctacaaaaaatacaaaaattagctgggtgtggtggcgcatgcctgtagtcccagctacctggggtactgaggcaggaggatcacttgaggccaggaagtcaaggctacagttagctatggtcgtgccactgcactccagcctggggacagagcgagaccctgtctcaaaaaaaaaaaattttttttgctgtctgtaatgactgcatctcaggctcatctcaaactcttgctgcccagacctggaaccagccatttctctaaggagttttggtttcttttaatgggcagcagtatttcaagatcacagcaaaaataaggatatatattgcaactggactggtcattgtttttagggcttttcagtggacaaaagctaaggaacaatatgcatatgttaagataacatacttcaagagttcataatgatattcccagttcaaatttggaactataagtgttgcttagccccttccatcttacatctgctatttcctttttcataccaagaatcctggttctcaaagatatgagagatgtaaactatcttgtaatgactcatttccttcttcccatatcatatacaatatataaccataatcatgatatcatctgctaccaaaataattactgaaaatggtttacaatttttaatatttttttcattctcttcctggtgtttctgagttgtactttacaaactgtagtctctcccttacatctcttgtagactcttagttctacaagcaagcattatttaatattcatcaacagtctttgctgatgtctctccagtcattctgactaaagctcattctctagtggctcctaaggagggacttgtgagcattatagtctgatttttttacatgtcagtgatggttcatctgctgtcttaatatctgaaagtcagtttggcgggatataaaatccttggctcatgtgctattctttgaacaactttttttttccatttccttctggtattccaccaaagtctaatggacatcttatttcctttataagtctcttgttctttttatctgcactacccaaagaattctttttttctttttcttcagatattattagttttaccaaaaatatgtcttagtaattggccattctgggtcagtttttacaggtacatgatgtgttcttgagagtttgacttcaagtactttttaaaattttttaaatactttttgttaaagaaatatttgttgaattacagtccttagtatttgttctgctcccttgcttgctttaatgttcttctttgggtcttcctattatacgtatgttggattttctttgcctaccttttttatttgtcacgttctctttaatcctgtttatctctttatttctattttacttaaaaaaaatttttttttttctggccaggttggagggcttacacctataatcccagcactttgggaggctgaggcaggagggtcacttgagcccaggaattcaaaaccagcctcgacaacaaagtgagaccctgcctctacaaaaaatacaaaaagtagccaggtgtggtggcacgcacctggagtcccagctggggttgggggattgcttgagcccagaagattgaggctgaagtgagccaagttcaccccagtgcactccagcctgggctactacagagcaagacactgtctcttaaaaaaaaaaaaaattatttattttcctcttaaggcattattattattattatttttttttttttttgagacggagtctcgctctgtcgcccaggctggagtgcagtgctgctatctcgactcactgcaagctccgcctcccaggttcacgccattcttctgcctcagcctcccaaatagctgaggctacaggcgtccaccaccacacccggctaatttgttgtatttttagtagagacggggtttcactgtgttagccaggatggtctcgatctcctgacctcatgatccgcctgcctcagcctcccaaagtgctgggattacaggcgtgagccaccgcgcttggccagcaacatttattttgaagataaaattattgcaagagtttgataattttagaaacataaagtgaatgtcccatgacgttaaaatataggtaatcatgctttaagaatgataaatttatttttattttatgaatatgatacctatggcttttttagtttataagttacaggaacacttaaaaaataccttataagaccggacatggtggctcacgcctgtaatcccagcactttgggaggctgaggttggtggttcacttgaggtcaggagttcaagaccagcctggccaacatggcaaaaccctgtctctactaaaaatacaaaaattagctgggtgtggtggcagacgcctgtaatcccagctgctcagaaggctgaggcaggagaattgcttgaacccaggaggcagaggttgcagtgagccaacatcacgccactgcattccagcctgggcgacagagcaagactccagctcaaaagaaaagaaaagcctatggagacagaaaatggatcagtgcttgcctgtggcttggagtgggaataggacacaaggggatttctgagtctgagagaaatgttctaaaactggcttacagtgatgactgcacacacataaaaaatgctttataaaatttcaatctctacccgccctgctccccgagatggagtcttgctctgtcacccagactggagtgcagtggaatgatcttggctcactgcaacctccacctcctgggttcaagcgattctcctgcctcactctcacaagtagctgggattacaggcgcccgccatcgcgcctagctagtttttgtatttttagtagagacagggtttcaccatattagccaggttggtctcgaactcctgatctcaggtgatcctcccgcctcagcctcccaaattgttgggattacaggcgtgagtcaccgcgcccggctataaaatttcaatcttactaaaatacattaagcgtagaatatagtagtgacttcttagttttgggtacttgaaaaaatatagcatgtatatatctggtttgttttcattttttaactttatggtttcatgatgtctataaactaaaaaaaaatcatatacatatttctaaatttaggttaaatgtgcacagtactggccaacagatgaccaagagatgctgtttaaagaaacaggattcagtgtgaagctcttgtcagaagatgtgaagtcgtattatacagtacatctactacaattagaaaatatcaatgtaagacctttcttgcccgaaattgtggactttatatgatggtttaaagaattattctttattattagatttgaagtttgataagcacatgcatttggataattcctatagtatctagccataatcacgtgtttttagattgtgtgtctgcatctagtagctttctgaggactctgaagaaacagtagaaactaagaatttcaaagttcagtttgatatttggggattaaaaattaattaatagaaatacatgaggattaatagagagggctttagaatcaggcaaacctggattcagatccagctctgctgcttagtagagctgtactttagacttgttccccaccctcactgatcccttcctcatctgtaaaatggaggttaccacgccttccctccggggctgtcctgaaggtcaaatgaggatgtgtatgcagagcacctgaccttagtaaatgcccagcaagcaatagctcccaggacctgtgactgccaagaatagcaaaatagtcaagaaaataacttacaaagctattgttaagtgattcacaacacaaaaatttgtccctattgagttggaaaaaaaatggtgttttatatatatatgtaacacgcacacatacatacatacatacacacacatgtataaatgtggcatgtggtctcaagaacatttacttgggtgtttgtttggttggttggttggttggttgattggttttttgagacagtcttgctttgccacccaggctggagtacagtggcataatcacagctctcaatgaggcctccaactcctggcctcaagaaatcctcccacttcagcctcctgagtatctgggattacaggcatgagccaccatacctaattttcttatttttttttaatagagatggggtcttgccttgttatccaggctggtctcaaactcctgagctcaagcgatcctcccaccttggcctcccaaagtgttgaggttacagtcatgagccaccatgccaggccttacttgcatttttcttccccagaaacatatgaactgttccttgggccttggttgaggtacatacacatagtgggttatgaacctgctgttgccagggtgatgattgaggcatttctccccctttcgccatttacctcttttgccctctttgtgttgtaatagaataaactagaaaataatgaaatgagagtaattctgagatgctaatagaaactgtgatagcttgaaaataggagaatgtttagcctcatatgactttaggaatgtatgtagtctataagtgaaatactgttttagttaaccattaagtaaattaagtgatcactaacaatacaaaaaaaccttaaagagaagggagatatatacatgctttttagatgtgtggcagtcccttttatggtggatcccttgaaacacttgtgttttttgctgcattgagtaagcacaggtgcatgctctgtgcgtgaggcctaggttctggttttccttctgtccagcttcccgtgacatccgtactaagcttattatacagtctcttgagtcacctaaaaaggctcaaaattacgaatgataatgcttagatttatttatacattcccattactatatttattttgtcccaactctttccatttacatgtgtcttaaactgcattgagatacatcaataactctttgatactggactgagctgtacattgttcattcccagaaacagaactgtatttccacaaggttctgaaagttctctgaatcatcttctcttggtatttatcccaggtaattactcatttgcttatggcattaaaattgatttagatgaagggcatagatgtgtttccctgtttctgaaacagtccttattgagaattgattataccttaagtaacaataaaatagaatgatttttgtgttttgtttatcagattccaaaatgctttcacatatatatcatctgaccagtagtcttcagttagtgtagatagtgtaaatattcttattatccccgtattttatattataaaaaataatagttaaaatccattaggttataggaatttttccatcgattacttagctaataagtgacagactgatctcattagttctcctggtcccctattttttaagacaaagtctcattctgttgcccaggctggagtgcagtggcatgatcttggctcattgcagcctccacctcctggattcaagtgattctcctgtcctagcctcccgagtagctgggaatacaggtgtgcaccaccacgcctggctaattttttgtatttttagtagagatggggtttcgctgtgttggccagactgatcttgaactcctgacttcaggtgatctgcccgcctcagcctcccaaagtgctgggattacaggtgtgagccaacacgcccggccatctcctaacttttgacatggggataagtccttttgaaaagatgctaattgttgtaaagagagattattgattctgaagcatctttctggagttgaggccatcatgtgagttggccagccactctgttttagttgctagcaactgtgtggtataatgacatgatcactggattttttattggcctgggtttagaacataccacaatataatagcaagaatttgtttgtgttctactttataatttttaattagaactagggattctttattctttagaaggataaagtagcatttcagtatgagaggcagaattacatttgcctaagtagataacctctagaatcagatagcccaagtttaaatcctgactctgccattcttgctgagtgacttgggtcacattactttactatagatgataaacagtacctgttttatcatctataaaatgagggtgataacgtacctacttcataggattgctctaaggatcaagtgagttaatatcatgatggtgcgggagccacaattacctttttagttgatcagtttcctttttgtaacagtaatgaattggaagggacaacaggaaccgggagtagttgaaaaggatactagcaagaaagaaagaaccaatgggagtgagaaaaagtgatgatggagtagggggctgatagccaatctcaacacgcagatctctgtctttattggagtcgctggggtgcagagatccagtttgcatctaagggagtctgacacgtatctattaacaagtccaaaggtaaagctgttgtctaagcaagccctgcgcctcctccagtctaatggaacagcaaaatgacataccaggagccctttagtgacttacttaaagctaaaagtttgaactcttgcccctgaagaagagattgcatctcggctttcagtgtggcctgtggcttaagctatggagataattttgagggattttaaaaatataaggtcatctagagtacttgtctttcagttttttctttttagttgcccttcactatttctgtaatgttggcccgctttacgtttagtgagttccaggaatactgttataatgctgactgtcttctatttccctgtccctaaagatttagcaagatgagagtctctaattattatgatgcttagctgggatttggttcaaaatagtttaaacagtttattctacctagaatgtcctctctcttctctgcacgtccttagtaacccctgtggcccacttcttacttaggtctctcctaacatgtatctatgacacattgatccctaacagctatgattcttcttatactttttcagtaatttaaattttatcattctactgcttgttcaatacatctctctatgtaaatcttgactccataatgaggtttttaacttcgaaggggttggaagttatctgctgccttggtacccccccgccattacacaagagtacattttaagcacattacacctgagtgattgttgtaaaacacagatgcaatctttccaccatcctctaagaattcttctgtggcttccattggttaccaaaaaaagtctgtgtccagtgcacaagaccatgacccagctcagcctggtccttgcctccttgtctaactccctctccttcgggtatccaggatttgttcgtgctaacagacagacttctctaataggtgaattccttggtgggggtgggtggcatgcctttgcatattgctttctctctgctgagaatgcaagcctgtccctagccgtttctgccactcctcctgatctggtgagtttgatctgcctttcacaatgaatcccagtcagtaaatatttatcactgacatgctgaccctggcaaaaattgatgagagactcaactaaggcagtgatagtgaaggtacagatttgacatctggttaggacatagggttgacaaactttgtcactctttaggtgtagaggaaatacccaatgaagaggttgaaaatgtgttgagttttacaattgactggagctttctaggggccacaataaaggcaattggtgagtatagttgttttaaaaatatccagtatctgttaagcatttaccatgtgcagggatatggcaggcacttcacattaattgttttatttattccttaacaacagttttgtaaggtaagtagtattattaaccctatttacagatgacagaactggggcttagtgaaagtcttttagaaacaaaatcttggtaccttccatatatacctaaagtgtgaaagtaattgggcctggggtcatagagctgtatagattttttatgataattggaaaatgtataatcttattatatatttatgatgattattaacttgcatttgaaggctgtgaacagggcatatgcttaaattgctgtggcctaacaattcctgttgttacacttgctcaactcacaggttattttcctggcttcatatatgcaagtttgacattgctgttcaaagactttaaatttagaattctcttttaaaaatgtaaatgggattttgccttagaacagcaagccactgacattttgtgcagaatgtagtatacataatgcagagttttacacagaaaacttggcaggcatgtgtggaacggctgcagacagggacagcctataattgtgggtgcaacccgcgtgtgtgtagggaggggggtgaagcagcgagaagggtggagggcagcagctggggaccagaggagaagtagtgtgactcggtgaccaaggagaagaaaagggtgcttccacagttttgaaaataaggagtttgccaaaaattgtaaagtctaaatgcagaccttgtttggaataaagatgaatttcgttttagctctgtatcctttggcaaccctttttttcccctctcattttttttcctgcgtgaaaaagagggaaaggggtccatccagtcatgcatatgaatgtttctataccagagtagtaaatatatgcatcttatgccttcgtgtggtcctttgtaactgtgaattatgattttggaaagctgtgtttttttaatcttgtttctgtaaggataaattaatcaaagttaacctctcaaaaaagtcctggttctgtaggggggaaaaaaaacaacaactgattttcaaaaatctattagtggggaagactatattatacaaatagtcatgagcatttctgggaactggcttccaatatcccagacagcgtgacctgaatgtgaaaaaagttgagaccactagttttgagccaaaatcatacaagcaaagagaaagcaagctgttgcccaagattgtggggtaaccatatgtttgagccaggacttgatgaagtaattgtgcgcaggaccccgtaggggtactgggccgtagcccacagagcactgcaggcccctgctcaaagcagaccacatgaaggcccacacagactgagtctggtcctgctggtggccgcagcaagtaagaaacaaagtgggttattaacatccactggaatcttaacctcatttaaaggaaaacttgactttgagttaactgtatcccccccaccccccgctgtcaagaacccacctctctagctcattcctgtgtcagtgttgccgtattaactgcccacctgctgctttgtaaaaggagactagagtttacccttcttattttagaatgttttgaattctcttttttaatgcaataaatttaatttaccttttttttttaacctacaataagattgattccttttggtgtacagtcgtgttgtgacttttgacagtgcattcagtcatgtaaccactgcccataacagaaacatagatcggttctgtcacctctcccctgccccagatgttcttgtgttgcttgtgtacagtcagtcctgtcctctacccccagccagaaaccagtaatctggtttctgtttctgtttttctgccttttccagaatgtcataaaaatggaatagtatagtatatagcctttagtctggctttgttcacttaccataattaatttaaaaataaatgtcttaaagcgtagaaaccatgatcattttaatttgtaatggagaaattttttattgcttttagtatattgagaacttgtggatcacactgtatttgaaattattaatgctggatgttaaaaggtcactaaaagtatgtactttttagaaaatttatttcactgtattttattagtattataccttatatactgagtctgggacatagaagtcttaatttctactgcaaaatggatttttttttttttttttgagatggagtttcgctctcgttgtccaggctggagtacaatggcacgatctcggctcaccacaacctccgcctcccgggttcaagcgattctcccacctcagcctcccaagtagctgggattacaggcatgcacctctatgcccagataaggtttgtatttttagtagagacggggtttctctatgttggtcaggttggtctcgaactcctgacctcaggtgatccacccgcctcagcctcccaaagtgctgggattataggtgtgagccactgcgcccggccgaaaatttatatttttaaagcgaaagctaacttctaattttgaaaatttttattgggagcaggatattataataataatctttagttgttaaaccattaaacatcaaggttttttacattgtttctatgcctcctccctcaaaaaaaaaaaacctcctacaataaaactgaaaaattgcacaaagacatattagtggaagaccactgcttcgtttacacaaatgaagagtataaagcagagaagtgctccttggggcaaaaggcaattggcaaaaagctaaggaacattttcataatgagttagaaatacagatcatcaggaatatccaggaagcgatagtgaataccaggcaggcttaagagacaggaaacatttagcatgttggtaaaccactttagcacatcagcaaaagcatataaacagctttaggattggaaattattgccatggggaaaggcaacaatttagaggagcaattccaattaaaaatataaagatcgtttctttagattaattcttgagttgctcccctatgcctgtgtagcagaatctaaaagataatcatgtgaacgggagattatatttaaaaaataaactttgaaattcataaaaaggaaaatgttaaagaatgtaaaattatactggtagaaaaaaaatttttttttttgaagatggagtttcactcttgttgcccaagctggcgtgcaatggcacgatctctgctcactgcaacctccacctcccaggttcaagcaattctcctgcctcagcctcccaagtagctgagattacaggcacgcgccaccacgcctggctaattttttgtatttttagtagaaacggggtttcaccatgttggccaggctggtctcgaactcctgacctcaagtgatctgcccacctcggcctcccaaagtgctgggattacaggcatgagccattgcacccggcagaaattttttaaaatagaaaaaaatagcccattcatgatacatgaattaaagaaaatattggtaacatgtatggtaacagattagtagctgagaacccaaaggctgccccaggttgcttcaaatcctggttctgccatgttccagctgtgtgaccttgggcaaactatcttaccctttgtttcagtttcctcatcaggaaaatgggctttaataggattattgtgtggattgagttaataagtaaagtgcttagaacaggcctccaaaatagtaagtgttgtatgcgttagctattattaatacatcacaaatttccactaaagaaaatcttccctagtttgtatatgggattgtcagaaaacaaatggaaaaatcatagtataaacagcctatatggctttaaagaattatataaaacacatgatctttctgaagtagttttttaaaagaaaaaagttagaactaacttctcccttgattttcactttttagagtggtgaaaccagaacaatatctcactttcattatactacctggccagattttggagtccctgaatcaccagcttcatttctcaatttcttgtttaaagtgagagaatctggctccttgaaccctgaccatgggcctgcggtgatccactgtagtgcaggcattgggcgctctggcaccttctctctggtagacacttgtcttgttttggtaagtgcttcttacgatctcattttaatctcattgatttttttttttaaattgcttccactggcagtgaataaactctgatgctgtatcccagaactgaggtttttcaacttaaacttctacttttggaaaaacctaaaaatctcatttccaccgttgcaactgcctcttattcatgactggtaggaatgtatccatgatgattttagagatccctaagaaggtgtttttcttcctggtagctttatattacagaaataataggtctctcccccacattttttcaaatataaattcatatgtaatattgaattccttcctcctcagacagatactttatctcattttttaaatttaaaaactagggataatgatagacatacttcacagggttcctgtgagaattcaatgaattaatacattaaggagacttagaagagtccctgatgttttctgagcattccataaatgtcagtattactgttactcccctgaggttcctgtctgtgcccccaacggctaattctttctccaccagtcattcccagtcccagcctgtatacagcctagatcttttcttctctttttaggacctttattttttcgttacttgggatacatgaaacttctgtttgcccttatacttctcctaacttctgtctttacttcttcctcttattataggatcaaacccaacaataatactgtctgctttgatttccatgccatctactccttcagtagtccctgcagcttagtttctgctttctgagcgtgttctaagattatcaataacctaagcagtttagcttgtcctggtattcagtctggtggggattttgtttttgtctttgtttagacagagtcttgccctgtcacccaggctggagtacaatggtgcaatcactgctcactgcagcctcaacctcctggactcaagtgatcctcccacctcagcctcccaagtagctgcctgcaccaccacacccaactagtttttgcttttttatttttagtagagacaaggcctcactatcttggccaggctagtctcaaattcctgggctcaagtgatcttcttgcctcagcctgccaaaatgctgggattacaggtttgagccaccacgcttgacacaagactggtgttcttaaccttgactttaaggccctgtattagtctcttcgatgtttctgtaaaacgtagctatgcttcattgcagttatgtcagcattcttatgctttccaccatgactgccagcacaaagtagattcccaggtgaattaatatgatgatgcttttcattgtaaacacacacacaaggagcttgatcaatggagtgatactcttggaaggagtgatactcttggaagaacatttcagacgttgcatctctaatgaaagctaggaattgggaacggttgagtcttaactaaacatctgtattactttaccactctgcgtatatatagtatacttcaatcaaaattagattgttacatcaaagttttaaaactctggtgattattttgttaatgacacctgttccctgccaactataacttcaacaattttttttcttttatttttggtgagcctgggtgtggggattctaacactaggtcagtagtccagagcagtgctgtagctcagcagtgttatcgtggatctgggcttttgctgtcttttccaccgtctttcttcattttattttattattctatttatttatttatttatttatttgagacgaagtttcgctctgttgccagggtggagtgcagtggtgcaatctcagctcactgcaacctccgcctcccgggttcaagagattctcctgcctcagcctcccgagtagctgggactacaagtgcgtaccaccatgcccagctaatttttgtatttttagtagagacggggttttaccatgttgtccaggaaggtctcaatctcttgacctcataatctgcccaccttggcctcccaaagtgctgggattacaggtgtgacccaccacatttttatttatttatttatttatttatttatttatttatttatttatttatttttgagatggagtctcgctctgtcgcccaggctggagtatagtggcactatctgacctcactgcaaccgccgcctcctgggttcaggcgattctccagcctcagcctccaatgtagctgggattacagacatgcgccgccacacccagctaatttttgtatttttagtagagatggcatttcgcgatgttggccaggctggtctctagctcctggcctcaagtgatttggcctcccaaagtgttgggattacaggcatgagccatcatgcctggcctcttttccaccattgttagatgggtgctgtatatccagacatcgtgtctgtagtgcagacatgaaggaggcggaaggggaatgagcagaaaggttgactcctgccatgacttttaaaaaaaaaaatagtccttatactagccagaactggttataaatccttcctttaaccaatgactggccagaaggaatgagattactatgattggtttggaatcagttgtgaatcagctaaagaatcaaagtcctccaactacttgaggggttgagatgtggggagggatgagtaggctgggatagttgttgtgtacataacagttatagctggagggttaaattatcgttgttctttcagaggagaaaatgcatagcaaaaatcttagcaatgatcttgcattgattctgtttcctgggttccaataacaagacttgtctcattttttgcctttcttgcagatggaaaaaggagatgatattaacataaaacaagtgttactgaacatgagaaaataccgaatgggtcttattcagaccccagatcaactgagattctcatacatggctataatagaaggagcaaaatgtataaagggagattctagtatacaggtaaacttcatacaggttttaaatcatatctatttgttaaatacacatagcatcaaataactgcactccacttgagcccttgtctttgtttcaaagagtgtatttgaatttttgtggtaaatccagctggctgtcttaaaattgtaaaattttagctagcttcctcatatatactcagcctcaggttaaatcctgtgtgttacttaaaagcccttgtagaaacaagatttcattaaagaaactgaatttttcattttgggggtggttaatcttttaattattaaagtaactggaaacttgagatacttttgccttcattaaacactgatacttggtttatgtgatatttgactttataacaacaagcaacttgaatatttatggcagatataatgaaattccagcaaaatgttatattcttctggttggtggctttattctcattaagctatttttactgcatatttgtagaacctaagttcaaagactgatcagaaacttgtgttatgtactaagttaaaatgtaaaatagaaacaaccacagactccattttttgtctggtttaatcacatagtattggacataagcagatactgtaagttgatgcataatataagaagatcgactgtcttttcattatgtttctcatgtgtgaacatatttactagcactttcatttctctgattactagccaatataagaatgtaaattagatcggaccattggtgtcagaataaaggtttatttaaaaagattttttccaaatctttaaatagcattaaaatattcttaatgcacagaaacattagggcactcagagccaaaatacgcaatgtttgggaaactcagcccattagaacatgtcctgcttcagacgccagactttgggaacactggatttgccagggtcactttggcagtgatcagtgatttaggtgaagtaaaagttatttcagatgtttaagattaggaaaatttccctttctaatcacagtgagctttcaccaacttaaatctggagttcaaaaagaaaagtagttcaatcagatttccccatgccttcacagcctgcatgccgccttccctgcctgcttcctggctgtgatgagacgggtaactgggagggaaatgtattgtcctttggattgtgtctttcctaccactgctttttttttttttaagttttgtgtctttagttttagaatacatactttatctgagggtggatctttttttatcacagagatgagtttttctggacacacttttttgtggagtctttgacagtgcagtttgtggctaggaaggattttttttctgttaatttatctggtgtgatattgtcctcaggctctcaattctaaggcattttctgcccctattccagataggatattggaaacatctttatccttcaggtactcaggatcagaaaagcatgctgcccattccaaggggttaatttctgcagaaatggtcttggcattctgagaatcttttttaattggtgcatttagaccatcggcatatgaagtgattactgataaagttggattaataaatacataccacacatgctactggtttttttttctttttttgagacgcagttttgctcttgttgcccagactggagtgcaatggcacaatctcggttcactgcagcctctgcctcccaggttcaagtggttctccccactcagccttccgagtagttgggattacaggtgcctgccaccactcctggctaattttgcatttttagtagagatggggtttcacagtgttgaccaggctggtctcgaactcctgacctcaagtgatcgcccacctcggcgtcccaaagtgctgagattacaggcgtgagccaccgcacccagcccaaagtgattgtatcttaagtctgtaaatatgtgtaattataatcttaaagcatgtattcatttacagaaaacttccaatgactttgacattcctatagacatataggctatttgcaattgcctttcagcacaaggtcaggcataaatacttaagctggttgctggtattaccacatatttattagcatattcccagtattgatgatgacagttaaccccccagagtaaatatctagtttggcaattcagaactaatgttgtaagatctctagctggtaatttgatattactaataaagtattaaatgtaaatgataaacttttaacaaattacagaggatttgaagtttaattgcattgcttaaagctttcttcagtgagagaaatgggtagagctagggttctaggcattgtgtggggggcatggctcctagtggcagtgactcatgggttggtgcaacgtgagcacagaattagaaagaaagatgaaacagtaccaggcctcaaaatgagagctcctttgaggttatagtttagtgaaatgtaattccttggcttcaccagtcagcattaatgacctgaggcaggtgactcaggagtgctggctcccttgtgtgtcacagggaggacagagacgagtgagtttgctgaacctatataggcatgagtgagtttgctgaacataggcacgagtgagtctgctgatcatagccatgaatgagtctgtcgaacatagccatgagtgagtttgctgaacatagccatggcaaaatgacattgttgggtttgtggggtttttttaattcactagcattaaatatctcttttatttctctctctgccgagtgctttccttgttgacgtattctgaatttgttgcatattctgggaagtggtccagtgagacttgatttttggtgtcatcttatttgttgacattgttgagtgttgtccagctataaggccaagttacataactaggtctcagtcaagagtggaaacttcaaaaattgaccagtgtaaattctggagacaatttaacatttttgtggggtactttgttgaacacacatctttataaggggtcacagcatagtcaacccagacttgcctaggttaaaattctgtctctactatttgttaggtgcatatccttgggcgagttacctaattattctccccacatcttccgtaaaaagggtgtaataatggtaatattagtattagtgcttatctcctaaggttattgtgaggattaagagctagcacatttgaagtgttagaatatggcatggagagtagcaagtactccatgtcttcactataaaagatttggattgagtaacaaaacaaacaagggaacaaagaaaatagacagtcatctaagtgaagacatccttaattactcctgtgttccattatattgtagtttcttgattgttggcacagtattctttcggggacatggtttgcgccctcttagggctcaggattttcagttctaccccactactcatgaagtccagagacctctttcccggaggtctatttcctttccagcctcatctctcctactcaagctttgcgtgttttccatcctctagacaaattgtaccaaactgtactactaactgttctccaaacacaacaaactgtagaatttcacattttctaaatcttctgtaaatcaactattataaaacaaaaaagccagccgtggtagttctctcctatagtcccagctactcaggaatctgagacaggaggactgcttgagcccaggagtttgaggctacagtgagctgtgatcacaccattgcattctggcctgggcaacagagtaagaccccatctctaaaaaaattaaaaacataaaaagaggtacattgattatgcagctaagtaaaatagccatatctgggaacggtgaagtgtggaaaatgcttttttttttgaaacagagtttcactgttgttgcccaggctggattgcagtggcgtgatctcggctcactgcaacctccgcctcccagattcatgcaattctcctgcctcagcctcccaagtagctgggattacaggcttgcaccaccatgcctggctaattttgtatttttagtagagacagggtttctccatgacaccgagtctcatctttcacccaggctagagtacagtggcacaatctcagctcactacaacctcggcctcccgggttcaagcaattcttctacctcagcctcccaagtaactgggattacaggcatgtgccaccacacccagctaatttttgtatttttggtagagatggggtttcaccatgttgcccaggctggtctcaaactcctgacctcaagtgatctgcccacctcagcctcccaaagtgctgagattacaggcatgagccactgtgccaggcgtgcctttttctttttaatacctctggtacatgatgacaatgagacaaattagaaactagtttatccattgtatgaatggatttcccagagattttttaaagatctgaatacaagcattgcttttaacagtaccatattgcacaagagtaactccagggaatgaatattccataagttctaaaaaactttaagttgcaatgttacatctctgtccaaaatcattagactcctcgggcaataagtagagtattccttatttattagatccaagactccttgcgtccttgataggatcttcaaagaaggccatccctgtccataccaagtcatttgggccagtgtcagtcataggtaatcaaaaccattggctcccactgcttctgcctctaccacttgccactggcagatacatagatggggatcatgtttcatcctttcaaggacttgagagactatagtcccagtgcataggttatatatgcgtttttcttctctggcatgtacaattgtcactgctttcatctgcaggggcccagatacactcttcttcctctacctttgtccctaggaatggtgacaagtgagagcacaggaaacatattttctagacatgatgctgggcgcttcacatgccatctcattaatcacaactgtctcccagggtagatgatgacatcctctttcatagaagaaactgaaatttgtcttcatcttggtccgaatcctggtttgtgttgccatctactcctgaaggccatgctagaggcatgctggagggtgtttctctagcccagtggtgggctagccagctgcctggagctgctagcgtacctgatagacacaaccaaattaaagtcctttagcatcacaaggaccagcttggagatctcaccgttagttctcccctagactgaacagtggcaaggagcaagaaggttccagatcacattcaagcaccactgtggtgactactccagtgttacatacctctggattagaagtggattaagattcaagcaaaatctaccttggctgaaatctttttaaaaatttttgtgttttttgtgcagtgctactttattttttattttgtttttttgtctgttggttggttggttcttttgagacggagtctcgctctgtcgcccaggagtgcagtggtgtgatctcagctcactgcaacctccgcctcctggggtcaagtgattctcctacctcagcctcccgagtagctgggactataggcgtgtgccaccacacccagctaattattttgtatttttagtagagatggggtttcaccatgttagctaggatggtctcgatctcctgacctcttgatccacctgcctcagcctcccaaagtgttgggattacaggcgtgagccaccgcatgccccggcctttgtttttaattgacacttagtaattgtacatatttatggggttcagtgtgatattttgatacatttatgtaatgaccaaattagactagcacgtctatcacctcatacatttatcttttctttgtggtgaaaacgttcaaaatcctctcttccagctattttgaaatctctatttaattatatattattatgtgctaatatatttcatagtacttgaaatatatataagtatatataagtatttcgaaatagccagaagagaggattttatgtgtatataaaatgtgtatgtatataaatttttttcgagatagggtctcattctcttgttcatgctggtgtacagtggcacgatcatggctcgctcactgtagcctccgcctcctgggctcaagtgatcctcctgccctagtctcttaagtaattgggactgcaggcgcgtgccaccacatatggctaatttttaaatttttgtagagactgggtctcaccatgttgcccaggctgatctcaaactcctgggctcaagcgatctgcccgccctagcctcccaaactgctagaattgcaggcatgagccaccacaccctgtctgaaatattaaatattattaaccatagtcattctgtgcagtaaaacaccagaactcatccccctgttgaactgttgttcagtttctcactatgccccctcttccctactctgcgaagcctccagtaggtactattctactctctgcttctatgagattaacatttttagattccacatatgagtgagaacatacagtatttgtctttgtgtacttggcttaatgtcctccagtttcatccattttgccacaaaagacaggatttcttttttttttaatggccaaatagtattatattatatatatatatatatatttttttttttttttttttccacattttctttctccctccattcattgatggacatttaggttgattccgtatcttgactactgtgaatagtgctgcaataagcacaggagtgccgatatgcctttgaaatcctaatttcatttcctttggataaatacccagtagtgggattgctggatcatatgatagttctatttttaatcttttaaggaacctttatgctgttttccaagatggctgtactaatttacattccaccagccgtgtacaagagttcccctttctccacattcatgccagcatttattttttgtctttttgataatagtcattctaattggggtgtggtgatatctcagtgtggtattgatttgcattattctgatgattagtgatattgaccattttctcatgtatctgttggctctttgtatgtcttttaagaaatggctattcaggtcttttacctatttttaattggattacttgtgttttctgctattgaattttgtttgagtttcttatatattctggatattaatccctgtcaaatgtatagtttgcagatattttcttccattctgtagattgtctcttcagtctatcgattgcttcctttgctatacagaagctttttagtttgatgtaatcccatttgtctgtttttgcttttgaggtcttatacaaaagacccttcccttgcccagaccaatgtcctgaagtgtttccctatcttttcttctagtatgtatatttgtttggggtctcatatttaagtctttagtccattttgagttgattttttaatatggtgagagataggggtctagtttcattcttgggcatctagatatccagtgttcccaacaccatttatcaaagagactgtccttcaccagtgtatattcttggcatctttgtcaaaaataaattggctgtaaatacgtagatttatttccatgctctgtcttctgttttattggtctttatacctgttcttatgatagtagcatgctattttggttactatagctttgtagtatattttgaggtcaggtagtgtgatgcccccagctttttgctcaaaattgctttggcttttggggtcttttatgatttcatacaaattttaggattatttattctgtttctgtgaagaatatcattggtattttcattgaattgcattgaatctgtagatcactttatgtagtatggacattttaacagtattaattttaatccatgaacataggctatctttccatttgtgtcctcttcaactttttccattaatgttttataattttcattatagagatctttcacctccttggttaaatttattcctaggtaatttttttgaaaatggaattgctttcttgatttcttttttcagatagtttgttagtgatgtataaaattctactgatttttatttgttgattttgtatcctgcaactttactgattttttttattagttataacagttttttggtagagtctatagggttttctatacataagattatgtcttctgcaaacagagacaatttgacttcctcctttccaatttgaataccctttctcttagctaattgctctggctaggacttacagtattatgctgaataaaagtgttgaaagtgggcatcctagcccggtgcggtggctcatgcctgtaatcccagcactttggggggctgagatgggcagatcatgaggtcaagagattgagaccaccctggccaacatggtgaaactctgcctctactaaaaatacaaaaattagctgggtatgctggcacgcgcctgtagtcccagctactcgggaggctgaggcaggagaatcgcttgaacctgggaggcagaggttgcagatcatgccactgcactccagcctggtgacagagcaagactccatctcaaaaaaaaaaaaaaaaaagaaaggaggcatctttgtcttgttccagatcttaagaggaaaagctttcaactttttcatgttcagtatgatattaactatgggtttgtcataacgtggctttgtgttgaggcacaatttcctccatacttaatttgttgagagtttttatcatgaaggtatgttgaatttttttttttttttgagacagagtcttgctctgttgcccaggctggagtgcagtggtgcaatctcggctcactgctacctccgccttctgggttcaagcgattctcatgcctcagccacctgagtggctgggattacaggcatgcaccaccacacccagctattttttgtatttatagtagagatggggtttcaccatgttggccagaccagtcccaaacgcctgacctcaagtgattcacccacctcagcctcccaaagtgctgggattacaggcatgaaccaccacgcccagccgctatgttgaattttatcaaatggtttttctgcatctgttgaaatgatcatatggttcttgtccttgattctgttgatttttgagagatcatgtttattgatttacatatgttgaaccatcctttcatcccttggatgaatcccacttggtcatggtaaatgatgtttttaatatactgttgaattcaatttgctattatttcattcaggatttttgcatccatattcatcaaggatattggcctgtagttttcttttttgttgtgtccttgtctggttttggtatcagggtaatgctggccttacagaatgattttggaagatttccctcttcagttttttgaatagtgtgaaaggaattagtattatttaaatgtttgttagaattcagccatgaagccatcaagtccgggcttttctttgatgggagactttttattactgatttaatctcactctttattggtcagttcaggttttctatgtcttcatggttccgttttgatagttcgtgtgtgtctaagaatttagccatttcctctaggcttttcaatttgttggcatacagttgtttataatagtctcttacaatactttgtttatggtattagttgtaatatctcctttttcatctctgatttgagtcttttttttttcttagtctgctataggtttgttgattttgtttgccttttcaaaaaaatgatccttggttttgttgatctttcgtttcttttttttggtcactttatttccattcttctggtctttattattttctttgttctgctaattttgggtttagtttattattttctagttccttgaggtacatcaggttgtttatttgagaactttctttttcttttttttttttttttttttgagacagtttcactctgacccctagactggagtgcagtggcatgattttggctcagtgcaacctccgcctcccgggttcaagtgattcttatgcctcagcttcccaaatacttggaattacaggtgcccaccaccactcctggctaatttatggtagagatggcatttcaccatgttggccaggctggtctcaaactcctcacctcaggtgatcctccagcctctacctcccaaagttcttgggtgtgagccacccacctggcctgattgtgatttttttctttttttaatttgttgagacttgtttttgtggcctaacatatggtccatcatggagaatgttccatgtgctgatgagaaaaatgtgtattctgtggctgttggagggaatgttctgtaaatgtgtgttaggtccatttggcctagagtgcagtttaaatccaatgtttttttgttgattttatgtctggatgatctgtccattgctgaaagtgggatgtagcgttctcctgctattattgtattgcagtctatgtctccctttagatgtaataatacttgctttatatatttgtgtgcaccagtgttgtgtgcatagatatttaaaatcattacatcctcctgctgaactgacccctttgacctttgtttctttttacaatttttgacctaaagtctattttatcaaaatatagctactcctcttctctttttggttttaatttgcatggagtatcatttctcatcccttcactttcagtcttagtgtgtccttacaggtgaagtgagtgtcttgtaggcaacatagagttggattttgttttttgttttttcatccattcagccactgtatcttttcattgaagtatttaatctatttacattcaagggtattattgatagataaggacttacacctgccattttgttaattgttttctgtttgcttttcatattctttattcctttctttctctcttattgtttacctttgtggtttggtgattttctatagtgataagctttgatttatttctctttctcatttgtgtgtctgctgtagttactttttttctttgtggttactctggggcttacattaaacatcttagagtgttttaagctgataataacttaaccttggtctcataaaatatttttggcttttaccctccccccacaacttataattttgttgcttaatttacatctttttatattgtgtggtccttaacaacttgtagctgtagttaccattaaccattttttacttttaaccttcataatggagatttgaaagattatattccacagttacagcaatggagttttctgaatttggtaattaatttacctctgtcagtgagattatattttcatatattttcatgatagtaattatacttttgcttccagtcaaagcagctcccttaagcatttcttgtaaggctagtctagtggtaataaattcttgcagcttttgcttgtctgggaaagactccatttttctttcatttctgaaagatagctttgctagtagttgttatctttcagcactttgaatatattatcccattctctacagtctgttctttcttggcgtgtacaggttttctgagaaatctgttaatagcaacctgccaggttcccttacatgtgacttgatccttttctcttgctgcttttagaattctctatgtctgacttttgatggctttattataatgtaccttggagagaggacctctttgcattgaatgtgttcagtgtgctgtcgagtttcatggatctggctaccaatattaaaattatattactgtgactaatagttgagtgtggtcccagtatagtttgtctcaaataggtaaaagtccacaagattttattaagattattatattcaactatatactcatgtacataaatactaaatgctttattataaaattttgaaattaaaataagcatagttgttacaagctacagtatggcaaaatgcctttttctttttcactcatcttttagcatcattgggttttcttaacttgaatataggattttaattcataaatttttttatttaaggaaaataaatttttaatgtttgcatttgtttttcatttctcttccctacctagaaacgatggaaagaactttctaaggaagacttatctcctgcctttgatcattcaccaaacaaaataatgactgaaaaatacaatgggaacagaataggtctagaagaagaaaaactgacaggtgaccgatgtacaggactttcctctaaaatgcaagatacaatggaggagaacagtgagaggtaagctttctataactacaggctgaaagatgaggcttttttattttaaaaataaattttatgggaccaggtgccataggatttcaggtatgtaatttttatattaggaaaatacaatcacgcctgtaatctcaacactttgggaggccaaggagggaagatcacttgagtctaggagtttgaaaccagcctgggcaacatagtgagaccttatctctacagaaaataaacaaaattagccaggtgtggtgatgcgagcctgtggtcccagccactcgggagactgaagtgggaggatcacttgagctggggaggtcgaggttgcagtgagctgacataccaccactgcactcccacctgggtgacaaagcaagaccctgtctcataaataataataataaataaataattatgtggatatgatatatgaaataatataggcccttttttttattgaattaatataacctttttttttctctgtcacccaggctagagtgcggtggcacaaccttagctgctccacctcctgggttcaagcaattctcctgcctcagccctcccatgtagctgggattacaggcgcccaccaccatgtccagctaatttttgtatttttagtagagagagggtttcaccatgttaacaaggctggtcttgaactcctgacctcaggtcatccacccgcctcagcctcccaaagtgctgggattacaggcgtgagccaccgtgcccagccaaattaatataacctttatttcttacctgagggtatttagtatatgatgacaaaggtgttcttaaggagctttcagccaatacttagaaaccagttcaaaaatcctttaaaacaataatgattgagtgtaaaagttaatataattgggtgctaaaatatatggtatggtacagaaaataagtagtatgaatacctgccatttgtactataattataatgtaactgataatatgcctttaataaaacatttaaacatgtaagcttaattgcattactggagaaagaaaaaggcgttttttaaaaatccatatgaatgtggcatctattcagaattttaaattacaattacatttctaagactgtctctcacagattaggaagctgataacctggtataagtcacatagcaaagtgaatgaggtttttctttcctctctcctgcatctctgaataacttttcttcttctctttttgccaaatatacttcttatcatggggaattttatcttgtggttatatttgttagattggaatgaaaatagtcgaagtctgccatacattatagctttactgctgtattttcctaatataaaaattaaatacctgaaattttataaatgctaacatattccaatatataatacatgtattattatatattatagtggaagagtttattatgatttagtaatgttattcccaatttttgacttcagtagttttagactgcaagagaaagcataatttttttggttccttttttcatcttaaatagaatatctttaaatcaggaaataatagttttaagttaccttagctttttcaataataaggctttcagattcctagtgttactgctttttccccccttttatctagtactatctgcagaattaaatgaaaaacaggcttgatgactgaaatggcattcttagtatttcagaagtgttgagttttaatctacaaagattcagaacaaccatgttaatcctagtgagttaaatcactcatacaagcttgcaaatacagaggagactactaaaaccactctagagtctataactctaaggagttatagagtgattgcagaagactgttttatggggtctgtgtgtgtgtttatgtgcctgtacatgttttcgcatgtggtggcggtgttttcttctttcccttttttccttccctgtctgataaatgagactggtgcatgtttgaaagcagagagtcccaacagaaaagtcagaattctaagcggagaagtctgattacaaaaacaaggttacagaaatgaaaaagaggaggccgggcgtggtggctcacgcttgtaatctcagtgctgtgggaggtcaaggcaggtggatcacttgaggtcaggagtttgagaccagcctggccaacatggtgaaaccccgtctctgctgaaaatacaaaaattaaccaggcactgagagtgagaaacaacttggacatacgaattttaaaatacaaaaattaaagaggcattaacgcctgttgtcccagcttcttgggaggctgaggtgggagaattgcttgaacccaggaggttgcagtgagccgagatcataacactgcactccagactgggcaacagagcaagactcttatctcaaaaaaaaaaaaatgtaaaagaagagcataggatcagggtgtgaagtaaaggttactctgaacagttttattttttaatcagtcccagtaatttttaatacctatagatagctttgcattaaagatcctcataaaagtcttatcaaaagaatttcaagtttcttttttttctttttttttttcctgagacggagtcttgctctgtcacccaggctgaagtgcagtggcgcagtcttggctcactgcaacctccacctcccgggttcaagcaattctcctgccttagcctcccaagtagctgggattacaggcccccgccactacacccagctaatttttgtatttttagtagaggcagggtttcaccatgttggccaggctggtctcgaactcctgaccttgtgatcctcccgcctcagcctcccaaagtgctgggattacagacatgagccaccacacctggccagaatttcaactttcaaaagaaatagaacacagtactttcttgtattcattttcattgtattcatttggaggatattcatcctccaaagcagtgtttttcaaattgaaggtcaaatcacatagtcgtgaagtttattggattataaacattttttaaagaagaaaatagaataaaatagaaattatcagcatatcacaaataataacatgaatttaacagatgctggcgaggttgtggagaaaaaggaatgcttaaacactgttggtgggagtataaattagttcaactattgtggaagacagtgtggtgattcctcaaagacctaaaaacagaaataccattcaacccagcaatcccattactgggtatacacccaaaagaatataaatcattgtactgtaaagatgtaaacacacgcgtatgttgattgcagcactattcaccatagaaaagacatggaatcaatctaaatgcctatcaatgatagactgcataaagaaaatgtacatatacagcatggaatactatgcatccataataaagaatgagatcatgtcctttgtaggggcttggatggagctggaggccattatccttagcaaaactaatggaggaacagaaaaccaaataccccatgttcttactaacaattgagagctaaatgatgagaacacatggacacatagaggggaacaacactgggggcctgtcggaggatggagggtgggaggagggggacaatcaggaaaaataactaatgggtactaggcttaatacctgggtgatgaaataatctgtacaacaaaacttgttgtacatgtcacggagatgacacaagtttcaagcttatgtaacaagcctgcacatggacgtacccctgaacttgaattttaacctgtttttatatatgtatgtgtgatgtataaattccatatatttacatatacattgtgtacctatgtaagtgtgtgtgtgaggttactctgttgtgatgctatttcttactgtaggttgcagtctgaatttgaaaggcagtattctcaattacagttcaacccagaaacccagatcactgagagtgagaaacaacttggacatacgaaaagtctggagcaggcagagtggctcatgcctgtaatcccaacactcggggaggctgaggcgggtggatcacttgagcctagcagttcaagaccagcctgcgcaacatggcaaaccctgtctctacaaaaaatacaaaaatccgccaaatgtggtgggacctgcctgtagtcttaagggaggctgaggtgggaggattgcttgagcccaagaggttgaggctacagggagctatgatcacgccacatgatcttccctgggcaagggtccacaggaggcattcccattggttaatatcctaaattgcataaatatacgggaaaacctgggcaggtcccatttggcaagtcattacacagacataatttctttaggccccactaaggaagaaaagattttatcacaaatcgagagtagtcttgtcattctctggaattgtgttcttaaattagatacaggcatgccttggtatttgtctctagtccattcctgaattatatagtgcacttttggaaagcaaaaacctctgttccattcttttaaatgagaaaaatagtgtgttgtcagcccaaccagaaagcataaccagttcccccaaatatagtacaaaaccttttaaactcctatgtagcatttaaagcactaattatgtaatcatataacacttaagggactcattattgggcttgtatggtaaatgacaaaatactagatacaaattataattgccttctataccgcaatgaaaataaaaaatgaaataatacgttaaagattatatctaaattggaaccttgttaacgatacccccaggctcctggcaaaagctaataaagggcccatgggaggctaaccccctctctgtttttatacatattttgcctacacttgaacacaaatgttttcactaacaggtacatgcatatttgtgatagtgaattttcaattcagagagtgaattctgagtaagaatttttgcaagtcattatagcagatattcagatggagttcagacagccagggatacctgtatatatgataacaaaaagtgaaaaagacatgagaaagcaccataagatgaacaaagatagcaaaacccagtctgtcctcaagttgcagaatatgtgatgaagataaaacaagtacccaagttagcacattattagtaaattataaattacttcaaattaaatgccgtaagaatagaagggctagagggggtggagcaagataattgaagagtagaactgaaatgagaggacaggagagaagggaaggtttctattttagtggggaacaaatttggagaacagcaaaaaaacggcaagaacaaagttctgcatagcaggagaatattggcaagcgtttgcatggacatgtgttctcagttctcttgggtacatatctaggagtggaattgctaggtcatatggtaactctatgtttaactttttgaggagctgtcaaactgttttctgtggcagctgaaccattttacattcccactaacaatctcttggggagagaaggttccagtacaccaaagaagtgtaacattgattaaaatattctaatacatagttcaattcagatttctcttgtctgaaagattcaccatatagcttttttaataaagttttatggaaatataatttatatagcataaagtttactcatttaaagtatacaattcagtgacttttaatatatttaccaaattgtgtagctggcaccacgatctaattttagaacattttcctgatcccaacttctgtagctgtttaaaaaatatttcaagattaatcaaagattgatactatatttagttgatgtgattctttggtctcctttaatctggaactgttccctgcctttttcttccttgcttgacatttgtatttttgaagcttctaggccagatatcttttagaatgccccatacaatgcatttctttaatcattatttatcatagttaaattcaggttaaacgtcttggccaggaaaaaggtagtctcaatgtaggagacattgaagaggcatttgagatttttaagcaccatcgtgcactaggcccggtaacgaaaaaaaaaaaaaaagattttaaatcaagctacgtgtccaggggtatgctctagaaaaattaccatggcaataatatttaatttgagggcagggaagctggttaggcctttgctgtaatacagaaaagtgaaaagagggaatggaagaaatagtaacctatatgttgccattggccgtttttttgtttttgtgggtgtgcttttatagagaggcaagacttgctatattgcacaagctggacttgaattcctgggcttaagccgtcctcctgagtagctggatggcattattatttatatagaaccagaactaagtatcttgagagtcagagaccttccactgaaacaaaatttctgagaccggacacagtggctcatgcctgtaatcccagcactttgggaggctgaggtgggcggatcacttgagatcaggagttcaagaccagcctggctaacatggtgaaacatcatctcactaaaaatacaaaaaaattagccaggcgtggtggtgcacgtctgtaatcccagctacttgggaggctgaggcagaagaattgcttgaacccggaaggcgggggttgcagtgagccaagatcgtgccactgcactcccgcctgggcaacagaacaagactccatccaccccgcctcccccaccaccccaaaaaaatttctgtattgactatgaaaatgggaggtagaaatgtgtatggtcaaataaaagaataagtgctcccacaacagaatattcatggaaatattaaatagctagcttttataagagccttaaccatcaaacgtgaccaggaaatgggatcagatgcaagtggtacccccttgtcttcccactcctgctcctgctgactagttaacaaggaaggaaagaaaactaacagtcatcaattcacgtgtcaagaaagtaccttgcttattttcaggtcccactaaaagcagttatcaatataaaactgtaccaggaatggttgtcaaggtacatctctgaatcattaaagaatattgaggcttttcttggccgggcgccgtggctcacacctgtaatctcaggactttgggaggccaaggcgggtgaattgcttgaggtcaggagttcaagaccagcctggccaacatggcaaaaccctgtctctactaaaaatacaaaaaattagctgggcatagtggtgcacgcctgcagtctcagttacttgggaggctgaggcacgagaatcacttgagcgtgggaggcagaggttgcagtgaaccaagattgtaccactgcactccaggctgggtgacagagcaagacgctgtctcaaaagaatattgaggcttttcccctcattattccagtgttcaaatagggtgaaaactatgtggatggttttatttgcgcctaggtcctctgtgttagagtactcaagtcctgctctgtgtgcacttcctttcacttgtttttatttcctcatagtgctctacggaaacgtattcgagaggacagaaaggccaccacagctcagaaggtgcagcagatgaaacagaggctaaatgagaatgaacgaaaaagaaaaaggtggttatattggcaacctattctcactaagatggggtttatgtcagtcattttggttggcgcttttgttggctggacactgttttttcagcaaaatgccctataaacaattaattttgcccagcaagcttctgcactagtaactgacagtgctacattaatcataggggtttgtctgcagcaaacgcctcatatcccaaaaacggtgcagtagaatagacatcaaccagataagtgatatttacagtcacaagcccaacatctcaggactcttgactgcaggttcctctgaaccccaaactgtaaatggctgtctaaaataaagacattcatgtttgttaaaaactggtaaattttgcaactgtattcatacatgtcaaacacagtatttcacctgaccaacattgagatatcctttatcacaggatttgtttttggaggctatctggattttaacctgcacttgatataagcaataaatattgtggttttatctacgttattggaaagaaaatgacatttaaataatgtgtgtaatgtataatgtactattgacatgggcatcaacacttttattcttaagcatttcagggtaaatatattttataagtatctatttaatcttttgtagttaactgtactttttaagagctcaatttgaaaaatctgttactaaaaaaataaattgtatgtcgattgaattgtactggatacattttccatttttctaaagagaagtttgatatgagcagttagaagttggaataagcaatttctactatatattgcatttcttttatgttttacagttttccccattttaaaaagaaaagcaaacaaagaaacaaaagtttttcctaaaaatatctttgaaggaaaattctccttactgggatagtcaggtaaacagttggtcaagactttgtaaagaaattggtttctgtaaatcccattattgatatgtttatttttcatgaaaatttcaatgtagttggggtagattatgatttaggaagcaaaagtaagaagcagcattttatgattcataatttcagtttactagactgaagttttgaagtaaacacttttcagtttctttctacttcaataaatagtatgattatatgcaaaccttacattgtcattttaacttaatgaatattttttaaagcaaactgtttaatgaatttaactgctcatttgaatgctagctttcctcagatttcaacattccattcagtgtttaatttgtcttacttaaacttgaaattgttgttacaaatttaattgctaggaggcatggatagcatacattattatggatagcataccttatttcagtggttttcaaactatgctcattggatgtccaggtgggtcaagaggttactttcaaccacagcatctctgccttgtctctttatatgccacataagatttctgcataaggcttaagtattttaaagggggcagttatcatttaaaaacagtttggtcgggcgcggtggctcatgcctgtaatcccagcactttgggaggctgaagtgggcagatcacctgaggtcaggagttcaagaccagcctggccaacgtggtgaaacaccatctctactaaaaatgcaaaaattagctgggcatggtggagggcacctgtaatctcagctactcaggaggctgaggtaggagaattgcttgaacccaggagatggaggttgcagtgagctgagatcacgtcactgcactccagccagggcgacagagcgagactccatctcaaaagaaacaaacaaaaaaaacagtttgggccgggtgtggtggctcacgcttgtaatcccagcacttcggaaggccaaggcgggcggatcacgaggtcaagagatggagactgtcctggccaacatggtgaaatcccttctttactaaaaatacaaaaattatctgggcgtggtggtgcatgcctgtagtcccagctccttgggaggctaaggcaggagaatcacttgaacccgggaggcagaggttgcagtgagccgagattgcaccactgcactccagcctggcaacagagcaagacttcgtctcaaaaaaaaaaaaaaaaaaagtttgaaaaccattggtatagatagatattttgaattgatttgcatagtctccttgaatgtgttaaattatgttgaaagtatgaaagcaggatgtaggtggtactacatattaaataagatttatataacatgtgcctgtgtcctgattcagtattactgtgtcctgtaaccttgaaatggagaggaggtaagagggacatttttttatgtctgtctgcattaaacctgtgttgaggcatccaagacccttacatttcaggttgttattggtttaaaacctctttccagtttgcattggtttgtctttgctaaatgcagtatgtttatgttactctgcaagtcacatacaggtagaccttatgacatttccagttgaaactaggcttgctttcggtacacaggtgaagacttgaggaagccagtgccagagaggacgtgcctcacccctcagctggctgaatgcgcttcattggcttacgctttgctttctgtatgctttctgtccttctgggtggtgtcgcatatatttttaaaaccacattcagtgtgatgaacacttgttggtacacttctaaggttagtcatctttccttctctgagcagatccttgagaagggcattgacagtggatgctttaaatagtgttcagtttttaccagtaataatattttttggtggatgtcatgaaaacacatgacatcgtgttgtgcccatgataaaaagtcctgactttttattgaatgaggtgtgctggtcaaagagacagacgtggctgccttctctggtaacagccagaggaaaaagttagcaattctagatgggttctacagctttaaaaaacttgttgtatccttaggtcctcataatattaaatattttctaattttaacagattttaagagtcagatatatactttgacttgaatgatgtagtgttgcttaaggaagaaaaaattataaaaaaaatgtttcttttattttcaggagtttttaattcatatctagttcatttccactcatatctatttctgctaatagattgacagcaacctttggtttaatgctgtgttctctagctacaccaacaagttatatattcctttccaatattaaccaagtatttattttatgttagcctatgactgagttttatctatgcttgcacatatatagaatgtaaaaatataattctccatgtttaatgtatccatataaaaatgaaaatacccattttctgcattcttaaagggttaagaaaagtaacatgtaataagcacatggaggactttagaccatttcttgtgttagaggagactttatacatttgtgaggttttctgtcttttggtccttttatgttcttagtccatttcattattgttttaatatttctaccaaggaatgaccaagaaaagagaaaggaagaaaaaaaatgtgttaatcattttcttttaatggtatgtcagcagaaggggttctgactgtaagctaatgtgcacttgtgcctgtcctctttgtcttaaactaaagttggtggtatgaatcgaaaaatgtgtattggtttaaaaagcagtttatgatatgaaacagtcttccagtttttatatcaactcctttgctttcaacagtcagttcaaagcaccatttattgatggtttactgtatgccagacactgtattttttctttacgtattaccctacttaatcctcaacacaattttatgaagtagttattgttagcctgaaactggcatttctccatccttttatggtgctgtctttgaaaagtctcagatgtgtaacatgtcctagaagtagataattatcaaaggaagactgcaactgcaactcacttccctctgagaaaaaatatccctgactagattacatatctagttccagaccagaacctggtggtattaaaagtgttttggttgactattgtataccataatgagtacctacattcccaaattgcctgcctggttgttgtacagacttaaaaatctagcctgccttgatttttacttttcagatacacatgtttaaagagatctttgctggtcacagtagctcacacctgtattcccagaactttgggaggccaaggtgggaggattgcttgagcccaggagtttgttcaagatcagcctgggtctctacttaaaaaaaaaagaaaaatttagctgggtatgttggcacgtgcctgtagtcccagctactcaagaggctgaggcaggaggatcacataagcacagaagtttgaggctgcagtgaactatgatggagccattgcactccagcctgggcagtagaggagacttgtctctctctgtatatttgtctctctctccctctctctctctgtctctcataatacatatatacatacatatatatatacacacacacacacacacatacagagagatatataaaatagatataaaaataaagatattttaaagattatttataaatatatgttttttaaaaatgtagtctattataagccaaatgtcattaggcatgtagtccatttctttctgtgttcaggcaggagttccagttctataaacattggtttatctgtttttctagcaggtgcacacatgggttctcagtgatgtgtagccggggcatagattgctctcagtctgttgcaccctgcaggggagatgtctgaggtcctccctcgcctggctgtgctggacgcacagtgcatagcagaactaactgcacagcagaaatgcctgttctgcgttcccattgatacaccaacagctaatgaagtctcttttacttttaagaaacccttatttggctttggcatatttacatggtagaggcctagaattttataaataaaattttgaagaatagaaatgtattttttcacgatttaaaaaccacctgtatggtttactctggagttgacctgttccactcatccttctccccagttcatttgtttcgtttcaattccactttcccttatagctatcttcaaagcagtgtctatgggacagcattgccaagagccctgactgggcctggcttggtaactcactcctgtaatcccacctgcccctagaagtgcagatatactagaaaatacagctgtctttgttccagtgaatatgtataaggggtgacatgccttggtggaaagcagctcagattgtgtggactcctcaatccctgctctaccaagagctctccagttccaaaactgtacactcagtggctatgttctgtgtgcctgctcccaatacagccattatgttgttcatccagatttgagaatttaagcttttcactcctctttgggtagtattatttaagtaagaacttctaggaaaatagtatgagtttggttatttttccctcggcagcaggaattttctgaatatttagcacattcagattgctccaagaacagcattgagcaatgctgtacatgtgctttctcctaaggctgtctcccctgtctactgggttctggaaagactcattgtccttcagggaagggagcatttttcctcactgccattgctgagccttttctcctgttgtatactatttagcccagcatgaagccatcgccgactgtaaggagtgatggatagaagtgtttacttggtttgtgaggccttgtctctaaagggtaacagtctgacaaggaaaacatttcaaagagccctgaccaggcctggcttggtaactcactcctgtaatcccagtactttgggaggccgaggctggagaatcatttgagcccaggggttcgagaccagcctgggcaacacggtgaaaccccactctatttaaaaaaaaaaaaaaaaaaaagccctgatccccctctctgggcgatccattgggagaatttgaaaagttcaaacttttgaactcttcctactttatttttttaaatttagaatggaaggtgggaattatgcaatttggtgaagatgttacagaaactgcttcacgactttctggttttacgttatacagtatgttttgaggagctccaagaattgcacaggaatttttttctttatacagaccattttttaaagacgcatcaagttattctttattgtggctctaatttggcatatttttcagacacaggttgctcttgatacatcaaatttctgctgttaaaaacttcagttattttgagtttagttaattcaggagcgggaacctaggtaagtcatctgtagagcatctttgcaccttaagagaagtttctgattagcctcaattcagtttagtagaatattagtgtggatatctggtggcaaaacctattcttggtgcaatttggcttttcgtggcctcaggcatagagctgacttggtagtggaccctctgtccacacccacccggcccttgcgcctttctagcataaagtggtgtgtcagagccactgtctccacagaaagcaccacgtttgtttcatttgacttatttgaacccgtttctcctgcctttgcctttttaaataaaaatagcaaaaattgattcaagtgaatctattagaattttctaaaatggagcccatttgtcttttcagtcttgcaagtaaagtctttaaaacaattaagcctcccaatgatttaaccgtattttcttacccccccaccctgaataatatttacaaagaaataataacgtgaatttttaaaaaccccgtccttcagttgttataaatgatagttcattcttggtaagtatatctgtaacaaaatactggggaaggacatgaggtatggtgaacacttaaaattctgccagccagcttaaatacataatctaaatttaacccacgtaacacctcttctaggtaaacagcattctccctatattcagatgagaaaactgagtcaaagaataagtaacttgcccaagattgcacagctagtacatgacagaactgagattcactctgcagtctgtagacttccagtaactccaaacctcatactttttcttttatgttacacggactctgtttttaatggaatatttaaatgagatatttaagtgggaaagtaatagacaaccactcttacctgttaaaatccaaagtaattctctagtttttaaatggagcacatttaaaaaactttgtgcaccagtttgaactaccactgcaacagagaaatactagaacatcagagtattctctaaaccagatcattacttcattcactttgattgaattgagttgcttattttaaaaagacttctggatgcatggaaaacatatatattttgcagcactcagaatcaatacaaagtaccttcagccactttggttcacattctgaagattcatgtaataaacacccatagtagttgtgggctcacattatctaatgagaatgttttcttgatgacttgacatttctccgtcactgttggataatcagagaaaaaaaggacgttcagaacaccaaggtgcttggtacaattatgccaagtgccctgtctttaaagggagtagcctaattctcagcatttgggagtttttgactaaatgtgtggatatgatttgtatttcctatttcttaatatatatgtgaagatacaatactgacaagtacttagatttggaggttttgcggtactgaggggagttgggggaagaatggaaataccattgacctcctaaaaagttgttacttgcaaagtttgggaggtgacatcaaaaactcaactgcccttacaatagtcattccatccatctgttgcttatttgaattctcatttatttttactttatggcattaaaatacaataaatctgtcaattatgtattttatattagtagtagcttaagattgggtcacttcatttcggtagatataattgttagtattatccttcaggacaaaaagcatctgctaacaacctgtggtttaaaaatataggccaactttatgttcaaacattatgttgataatatttttagcagtattacacagtggaggtccaaattggattagacttttgcattgaattccaaagtattggtaagtctagcacatagtataaagtcttgctaaattcttgtgggtacattatttttaaaacctgtctgtctgtcggtatcacacagaggtcacttcttgagtaaaataagatgaccttaagaattcacataattcttgaagaagaatataagtcacgatgcttccacatgaggccgcgtcacaccaccatcgtttggaaatccagcaccccagccgttttaccctaagataacagtgcagcacttagtgtggttgaatgtgtcatgtgggaatgatttttggtcaccttttcagttcattgttagtccttttatgtttgtgtgcatctatgttcgtctgtgtgtttggtaaatatgaattgaatagatgacttcttattttatgttttaggccaagattgacagacacctaatattcatgacttgagaatattctgcagctataaattttgaaccattgatgtgcaaagcaagacctgaagcccactccggaaactaaagtgaggctcgctaaccctctagattgcctcacagttgtttgtttacaaagtaaactttacatccaggggatgaagagcacccaccagcagaagactttgcagaacctttaattggatgtgttaagtgtttttaatgagtgtatgaaatgtagaaagatgtacaagaaataaattaggggagattactttgtattgtactgccattcctactgtatttttatactttttggcagcattaaatatttttgttaaatagtc

SEQ ID NO: 4 - DNA, 59127 bp, Mus musculus
tgggggggcggggcggggcgcggagcgcgcatgcgccacagtgccagcgctctccccggatagagcggggcccgagcctgtccgctgtggtagttccgctcgcgctgccccgccgccatgtcggcaaccatcgagcgggagttcgaggaactggatgctcagtgtcgctggcagccgttatacttggtgagtcttaggcccgcgcggcgtcccggggcttccgagggtcggagctcgcgcctgccggctccgtgtcacctcccccgtctcccgctcgggcggaagtggcgagcgcgggccgcgtcaggggcgcgcctgcgcggacagtcctcaccgctgtgaggcttagacctgaagcaccgaggtgccggtcgcctgttggttctgaaggcggcgccacagcggcgcctgctggcggcccggccggcctcggcgtgtggtgcgccgggcggagggtcgaggggcacccggcgcggggtgggacgggctccggcttcctcgctgaccgtgttcttgtcggccgaatgttcggtggccgagcgcgctggtagcgggagcagcgagaagggcgagagagccctctaggatcggggccagcgaaggcaaagcggggtcccacggagtctcggtcatttgcgggtgtcccgggggcctgtggccggagctctataccagagccggagctgaagcggcggcctaagctcctgagggatcggggatcgccagtcttttcattggccactttctctgggagagcgggtcatcttctgcttagagctccccggaacaacaggggctttggttgtattaccattgattaaagtagcgtcctctttagaatttcctttgcttaggcatactttatagatgtatatatagtacaccacaggaatttatatgagccttgcagttggttgcatttcccaaatgagtgcactggtcgtcgtagcactcaaaagtaacccaacaatctttcggtccaaaagaggccacatgtctataggccgccgctgtgctctgtcaccagagaataaccttacctattcagctcattctaaagtattctttcctatgaacgcttgtgactacctttttacagcgtgtgggctaccttttaatccaggcaaaacttttctccccttaaaaatgattcattgctaatcattaacgtctatcccagatcagatttagtgattggtgtctccttatgttttggcttgttactacagtacagaaagaagctagaaagctttcttttagctctggatgactctgggttttcaccatttcatttaattagatggcagtaaaaattcgctttgtttaggacttatttctcccatcctcctttgagataaggtctcacagtctataacttttgctggctcagaacttgctttgtagacctgcctgaccttgaactcctaggctggctttgaagtcctagtcttctaactaccagtgtcaaagttctggaaagaagttgtagaaaatcttaaatgcaaattctagtggatttgtgtgtgtgaacttgcaggtctgtgggtacattagatttagcagagtgccgcctcaaaaatgccaatgacaaaaggggtactaaatcaaggaagattgctgggtggtacatgcctataaccccaaagtttaagaggcagagggaggtctgtgaagtgattttattttatttatgtagccttggctgaccttgaactcagattgtcctgcctccccagtgctgggactaaagccgtgcacctccatgtccagcacagctctgagtttaggctagcctggtctgcatagttccagaccagccagggctacatagtaagatcaagtatgcatgatcttatatacatacatacatacatacatacatacatacatacatagaggtgggagggggactagagagatggctttcatttaagagaacttgttcttccaggttgattcctagcacccacaagcagctcacaactgtttctagctcctgttattgggaatccgaagcactcctctggccttcagggatgccagttatgcacatggtgcctaggcagacaaaatgccatacactcagaatcaagggggaaaagtaaaataataataataattactattgttactactactattattttaaaaacaagggttcatactagcaacttaatttagcctaatttattttctgagaccaggtcttgcttagtatcacaaactggcctataatttaccactaggtttggatttgtgacagtccttttgccttagtcccccaattgctaggattatagggaagagccaccacatgtggcttaattgggtacatacatgtaagtcattaatgtctgagaagtaagtgaaagttgtgatcccacttaacagggaaaaaaagcacttatgctggatggtggctcagcctgtaacctgtcaattaggctgaagcaggaggattgttgtgagtttaagactagcctgcagctgggctttggtggccaagcctttaatcccagcagagtcaggttgatcttcagtgttcagccagcctaggctgcatggtgagttctatgctacccaggactaaggaatacattcttgtgttggaataaaaaatttctaaacaaaagccagtcatagtggcatggtttttttgggaggggggcatgtttcgagacagggtttttctgtgtagccctggctgtcctagaactcactctgtagaccaggctggccttgaactcagaaattaaaggtgtgtgccactacagcctggggtggcatgttttttaatcctagcaccgaggaagtggctccagaaagtatctggagttttaaaggtcatctccagctatccgtggagttatgggtcagcctgggataatcgagactcggtttaaaagtaaaaatcttgctggcaaggttgctctgtgggttaacagttgcccagcctgaaaacttgagttcagtcctgtgattcacaaggagggagagaaccacctttctttcacagatcttcgtatatacctgcctttttgtgtgcagccacaatagcgaagttaaaatgtaattgtaaacaattggatgttcagggagatggcttatttgtttagtgtttgctgtgaaagcatgaagacctgtatttagatcttccccatttccataaaaagccaggtgtagctctaatcttttgtgctggggaggtgaagacctgcaaatctctggagctcactggtcagcgggcctccctgaagcagtgagctccaggtttaatgagagacccagtttcaaaagataagggtttgggggctgcagagatggctcaggggttaggagcccttgctactcttgcagaggacactagttcagttcccagtgtccacatcaggtatctcagaactgcctgtaagttcagtgccagaggatctgacatcttctgtcctctatggggagtgcaatcctgtgcacaaacacatgtttacacataactaagagtaaagataaaaactttttttaaaaaaaggtatagaactgtcaatggcaagaagattcagagcatatgtgtcacctcccaagcctgacagtttgtttgatccttggtacccacatgatggaagaagataactgattcctacaagttgtttcctgatctccacatgcatgcatagcctttataagtaaatgtcagaaaaaataaatacaggcaaatacacttaacttgtgttcactgaaaatttctttttcagaaaccctccatagacaagtgcacaagatctttaagcaaaatagtagttctgtgctggcactttttttttcaagcccaagagcattaaaaccatgctatgtacattggtgttacagtaaaagcaagccaggagccactgaagctaataatgacaagcaagtccggaagagtttggacttaatgctttcttagtatcctggagcatccatctcacattccacagagatggctgctaccaacatctgtgctgtcaaggctctaattctgtgagtcttgaggacctctttggaaggtcatactttgctttctttctttttttttttgagacagggtttctctgtatagccctggctgtcctggaactcactttgaagaccaggctggcctagaactcagaaatccacctgcctctgcctcccgagtactgggattaaaggcatgcgccaccacacccggctaattgagttacttttaagatattagaataactggccaggcggagaagtagctcaagcgaagcagttatttctctccttcagctctgtactcactgttttcccagtgcccacatgtaaaattcagctcttctgcctcaataccactggggctgcctctgtgtggctttatttcctatgtcatttttctccccctcctgcactattgtggtctgttcttggaaatgtgtgtatccacttatccccgtgagcctctagaatgaaatttcctttgcacaactgctctcctgttgcttctttcccctgttgcttaacacctttgctcatgtctgacgctggactaatttgggaagcttcctaacctaccagtccatgctggatatgtgcaaatctttgacagtagggttgaagaaatgcagaggttctgtgtgtgttcccagcacccacatggcagctcacaaatgtttgtaactcctgtttaagtgagcattcttccttattacaagtaagtgacgctagtaataatgttttatgagttctgctttttctgaaatgctaaaggagctaggagaagaaaggattgctctcaagggtaaatcaagatcctcagcttttagctgcttgatggacatgagaatgtttacttcgtattttatttcagtttttgtacttacgaataaattgagtatttttggttgaggttctggcctcctcgtcttttttattccctatagacagttgctttagagcatcacttttggaaataggtgtcgtagctcatactgatactagcacttgagatacttcagggtggaggatcttagaggtcagtctgagcagcgtatctaatttcaagttaattcatgtaatttagcatcatcctatttttaaataaaagaaaacaaacctaaaaagccatgatttagtaataggaagagtttcttggttggttggttggttggtaggtttttttttttttgagacaaaaaactcactctagccttgtctgacttagaattcacaatgtaacccggttgggctccaactagcaatccatcttcttctgcttcttcagtgctaggataaagtcaagcaccaccatgccctacttttgtttttttgttgttttttgttttttgtttttttgagatagagtttcaatctatatagctctgttactttggaactcactgtttagccttgaaccaatgctgatcctcctgcatcagtttctgagtactgggattagagacatgggtcatcacgcctggtgaatgttgctggatttgtgtttttgttttctgggggataccagtcatcaagtctgtggtttcacaatgccagtcagatgctctaccactgagccagagccacagttacctctcttctctccccacacaatttctgagctaggtctctgtaatttgctagccttgaacatgatatctttctcctttagcctacaagttgttgggtacaggcctgggccaccaggatgggcaaggcgaaagttctcgatttatagaaagaaagaaaaacaaaatgctgcagttgctaaaatctatattaaggccaaatcttcagtctgaggaattggaaggataaagaaatttgctggttttgctgctgtggtgtgtgtaagtgtgctaatatggaaaaggacttaaattgcagagctgagtattattatctggtgttctacattcactgggagctaggaatgaactcccacagataagtctcttggactattttacatatttatacacatctgtagattttttttcttttttttttcttagatattttcttcatttagatttcaaatgctatccccaaaacctcctatccccccccccccccccccccccgttccccaacacacccaactcccgcttcctggccctggcattcccctgtactggggcatatgatcttcaaaataccaagggcctctcctctaattgatggccgactaggctgtcctttgctatgcatgcaactagagacacagctacacagctctgggggtggggggtggggtactagttagttcatatcgttgttccttcaatagggttgcagacccctttagctccttgggtactttctctagctccttcattaggggcccatcccaatagatgactgtgagcatccacttctgtatttgccaggcattggcatagactcacaagagagctatgtcagggtcctgtcagcaaaatcttcctggcatatgcaatagtgtctgggtttggtggttatatatgggatggattcctgggtggggcagtctctggatgatctttccttccatcttagctcagaactttgtctctgtaactctttcttttcttttttttttttttttaaacctttaacttatttcttttttttttttaaattaggtattttcctcgattacatttccaatgctatcccaaaagtcccccatacccccccccatcccctacccatccactccccctttttggccctggtgtttccctgtactggggcatataaagtttgcaagtccaaagggcctctctttccagcgatggctgactaggccatcttttgatacatatgtagctagagacaagagctctggggtactggttagttcatattgttgttccacatatagggttgcagttccctttagctccttgggtactttcttgggggccgtgtgatctgtaactctttccatgggtattttgtcccccattgtagagttatttttaaaattatctttgtgatgtatagtgtgatgacatactattaatttttacttttgctgatgtatagagtcctaaattcttgtaatgaatatgtattaatttattaaaggtgcaaatttctttttctctccaataaaatcacagataaaaacccaaagtaaggctaggtatagtgtggtgcatgcctctaatcccagcccttaggaggcagaggctattagatttctcagtttcataggaggcagagcaacataaatgagaccctatctcaaaaaacaagagtaagattctttggccacttggtagcctggttctcctgagattactggtacaccctcatattggaacagggtctcaagtagcccaaactgacttctaactacttaactgagactggctttgaatatataatcctgttgcctctactccaaagtgttgcaaccacaaacttattaccaccatgctcagaatattttgtattttaaaggtaagcattggttattaaaacaaaacactagtaagctaggtatggtgtgtatgcatgtaatcccagaatttagaagactgagattaggtttgccatgaatttgaggccagcaagggctacaaagtaagaccctatttaaaaacaaacaaacaaacaaaaaaaaaacaaaatccaaacaaagtaaaaccctgcaggagatcttagaatttatttttctacattgtatcaacacagtaaggttttttgttatgtgtgtagtaagtacagcctgttcatgccatacgtgtatagagggtcacctaaaacttctgggagtagttttctcctcctcagcaagctcctgcgatcaaactgaggtcatcaatttgtgtggtgctagcccttttatctgctgagccatctcaacagcctgagacttaagatttttttatacatacatacttttaaaattaaaaggttgtttcaatatgtaacccaacagaaagattttaactaaaaacatttgcttatctcaattccaataactgcactgaaataaattccttcctccctcaaatttgtatttagaccaggtatcacttacttcaagttaattataaaagctatctccagaatatatgtacaggtacacacacacaccacttacttcaaagtaattttgaattatccccaaaacatacatgtacacaccattaacatctgtctgtctatctatccattcatccatccatccatccccccacccatccatccacacacgtaaaaatagtgcttggtcttgtattcagatctcacctaccaccaccatctagttttttttttttttttttgagataagctcttttttgtttgtttgtttgttttttgtttttcgagacagggtttatttgtatagccctggctatcctggaactcactttgtagaccaggctagcctcgaactcagaaatccacctgcctctgtctccctagtgctgggattaaaggtgtgtcccagcacgcctggcttgtggctgtttctttaatgatcgtcttataacaaattgttttaaggattttataaatatctacttaggaggatcttctcaattctgtgatctgtgtaaaagaattattttatggtctggtttgttgcagttaaaaaaaccctgaaaatatggtagtgactgtaatgtagacttcagtgatttcttcagcataagtgtgccatcgggtaccattcttcacctagtaatgtagaagcatagttatggcttctttctgctgcagacggggaaacttttagcaccagaatgcacatcagttgtttttgcaacatggccttggtggtagctcagctgttggccttccttgtctctttttgagaaacactttgtatttcattaactatactaaaagatcggatacatgcagggaagtggggtatctgggggcctgccaggctgtgccgttaaaaattacgccatgtaacaggtttattgggagagtagggagactgaaatgcctccctagactgggacattagagagagatagacagacagacagacacacacacacacacacacacacacacaaagatagataatgaaggagagagaggagtaattgaagagagaaacaagagagtgatctggggtggggtggagttaggagggggttacacactgtgtgcacctgccacacctgtccccctgttggctggggtggaaggtgacataagccacctttatattcctgagggctaacactaaatgctcataaaagttacatcttgggtattgctcccccccccccccaaaaaaaaaaagaaaagaaaagaaagctgtacagtgtcagatggtagtttgtgatgagttttggttatacactgtcttagggtttttgttactgtgatgaaacaccatgaccaaaaccaagttagggaggaaagagtttatttgccttacacttcctgtttgaaggaagtcaaaccggtcaggaaactggaggcaggagctgatgtagaggccatggaggggtgctacttattggcttgctccttaaggctgctcaggaccaccaatccaggggcaacaccacccaccatgagctggaccctctcctattgatcactcattaagaaaatgtttacagttgaatcttatggaacacttggggttccttcctatcagctaactgtagcttgtgtcaagttgtcataaaactagccagcacattctcattatttagacatctgatttagctgcataggaaggaaaataaagcagtaattgacaataggtttgtggtttttgtttggtgagagttctgaagctagggctgctgttgtgactccctagtgccactgatggtagcctttaatttctgtgtagctttttttttttttttttttttttaagcctagtgatcacaggaggttcctgcctactcccatcccttactcctggtggtcaaaacagaagagagggcaagagtttgctgaggcagtttttctttattattgaggtttcatttttgaggcaggatctcgtcttaagtgttgcccttggccaagcatggtggcacacgcctttaatcccagtactcgggaggcagaggcaggaggatttctgagttcgaggccagcctggtctacaaagtgagttccaggacagccagggctatacagaggaaccctgtctcaaaaaacaaaaaaacaaaacaaaacaaaacaaaaaaaaaaaagtgttgctcttgatcactattcttgggttcaggtggtcttcccacctcagccgaggagctgctactgcccagcagcttatccagtgtgtgcaggccactcagctggcacagatagcaggataaacctttctctacaaccaagcccagtgctgctgcttattccattggccaccttttgtcacaagccttttaaaatttgagacagggtcttattccctatgtaggtgaggctgctttcatagagatccacctggctgtgcctccctagtgctgggattgaagactgtgcaccacccatgcctggctcatagacatcaagctcttgtaaactagaaaatcaaattagaaaccttcagttaggaagaagggaaagtgggattggctgttggtgtgtgtgtctctggaactggtctttataaagcattgggatttcttatcttacactggccagagttaaaaacagaaaacaagtggaagattgaaggtctgaaagaataaattcactaagggtttttttgtattcttagctaacaaaagaaagtaagtatggctctatttttttagggctgaatatttggattggggtgtatatatggcattgttttgtaactcttaagtccttattgctgtactagctcctgccatcttttatttatctaataatgcatcttaattaattctttgagaacttgtatcttgatcatattaatatgcccctcccctgctttttccctgaaactcttgccaggtccatccacttcttatctccccatcacattatgccttttttatttaacctttttatggatttattacttttaattttatgtgtgttttgccttcatgtatatttgtgtcatgtgagtttagtgcctacagcggtaagaagagggggtcagatcccctggaactgaaattatacatgttagccaccatgtgggtgctgggaattgaatctgtgtactctgaaagaacaatcagtgttcttgactgctgagccatctctctggcccctatgtttagtattttaagagatgcctggagagatggcttagctcttaagagcactggctgcggagctggagagatggctcagtggttaagagcaccaactgctcttccgaaggtcctgagttcaaatcccagcaaccacatggtggctcacaaccatctatagtgtggtctgatgccctcttctgggatgcagatgcacatgcaaatagagcacttgtatacataaaataaataaatcttggggggaaatccttaagaagagaccgtctagctgggtggtggtggtgcaggtggtgcattaattcaatgagaggcagagacaggtgagtctctgagttcgaagttagcctggtctgcagattgttgcagtatcctgtcttctgactcaatctttgttctttcttcgtagatttttccctaaacccctaggtatgtaggaagtatgttgtggatttagtggctggctaacccctggttagctccctgcattttgacaagttgtgaatggtttctgtgttacatgaagtttctttaataagcagcctgtcctacacttatctatggatataagatgaatagtaggagtgggattgagagctatactttgttggtttttgtttgttttgtttctctgtataacagaggcctagctgtcttgtagaccatactggccttgaattcaaagaaatacacctgcctctgactcccaagcactggggttaaaggtgtgtgccaccaggcctagcccttttttcccaccaacatcagtaattattatagtgtatacatagaattttgtctagactgaaaaataagaactagcaactaatagacaatcactgaggaagataggattatacaacagaacagttgaagattcttgtacaggtttcatggagggaacctctgctgaccagtaaatttcctttccttgtctgtctgtccgcctgttcgttcgtctgttcatccatccagctatccatccatccatctattgagtctggcctagaactctacctctagctcttgagtgttgagattaaagacatgtgccaccacacccagccaccagtagttttttaaaaatctcatttataattgcattagagttaataagattactcagatgaaactgttagcatattatttttgaagaaaaataaattaaaatatgagctgtaacacaaaagaggtgaataaatagaaacaaagcaacttttatttccatatatttagactttactatttagcattagtaactaaaatttaattatcttgatgataaatgaaattttgaaatagaattacactttgaaagaacaagtgtaactggtgaatgtaaaaattaataaatggcatggatcatttctgttagcattgtgaggtttgatatgatataaacatttctttgtagagtacttaaagtaagtgcttaatgttgtcctatattgcctgggagaatatatgttgctgtataaaatttaagagggatattaaatatatatttttgttattttaaggaaattcgaaatgaatcccatgactatcctcatagagtggccaagtttccagaaaacagaaaccgaaacagatacagagatgtaagcccatgtaagtactgtaagatacagagatgtaagcccatgtaagtactgtgagatacagagatgtaagcccatgtaagtactgtgggtttatgtgcatgtgtgtgttcttcagcttgtttcaggagacccgatgcagtgacagtctttgggtaaagattgattagtatagcaatttttaaacttttatatacttttgttttgagacaggctttcactctgtagtcccactgttctggaaattaccatgtagcacaggctgacctcaaatttgcagcagtcgtcttgtctcagcctccagaatattgggattattaagtgtcagccaccacacgaggtttaatgtatacattttctcatgtgtttgtacacacgcatgtggaaggttgaggttgatggtcagatgtcttcctgaattgctctttaccctagagatctgttccagctagtctggctggccatcttgttctgttagaacttgtcctgggattacagtcaggctgccacacccacctggccttccatgcgggttctagggatccagtctccaccccttacatttacttagtcatctccccatccctctggtttgaggaacatctgattagctcttctaagctctggtagaattcagcacttaattgtctgttgcactcaggtggaggatgttcctataacagctcagcatttcctatcctcatccagggttctgcagtctgccagtgaactgaccctcacaaaggctctccttccctgttgtacagcttttttctccaggtgtcagagccacttactgtgtgtcgtgtcatccccctcttcagcacattcatcctggtgtcctgatatctgagtaaacactatgaaacaccagccttagagtacctaggccttttcagcactctttgatcttgtgcccacaaagaaagcagggagggattttttaaaattttgtggcagggctccctgcatctgctatactgtcttccaactgtgacttcctgatcagtctcctaagtgctggaattacaggcctgtgcaccacacccagctttcaccctgcaccttgaaggtcactttctgtgtgtcactactgcttttgttgtttatttttttgttttgctttgttttatttttgtttgtttttgaatatttcacttagaatgtatatggtttttcctggcattgggttctttaatactttgagttttagattactcaagtgttgctatatccttcagtttgtttgttcgttgagacagggtttttctatatagccctggttgtcctggaactcactctgtagaccaggctggcctcacactcagaaatccaccttcctctgcctccaagtgctgggattaaaagcgtgcaccaccactgcccagctgctatatccttccttaaccagtctgtttctcatatctatttagctgttttattttaaaatatctttgaccttaattctccaatttatgaagccccattttggaagactttattctttattcccttagagagtttaaaaactcaagaacttagagtcaagaaacaacacttaagctgtaatgtgacaccggggaagtgcctcagcttatgcacatccctgaagtcccagggcttctgtttctctattcctttgtacatacatcccttccttctttcctcctcctggtctgccttgctatcttcagcctctttgtccctgcttttccttcttattacataaataggatgtagaatgcttttccctttccctcccacccccaagttatttcctaggtagatctatgcatctacacaacaggggtttttgtttttgtttttgtttttgttttttgagacaggatttctttgtgtagccttgactatcctggaactcactctgtagactagactggcctcaagctcacagatatccacctgcctctgcctccaagtgctgggattaaaggcatataccaccatcgctgctatcatcactgccctgctgaacataacagtttaaaaagaatatattctgggactggagaaatggcttagaggttaggagcactggctactcttttagaggacacgggtttaattcctagcacccaaatgcatctgtaactatagttctagggaatctgatgtcctctcctagctagcctctgtaggcactgggcacacaagtgtaggtacataggtatacatgtaggcaaaacacccatatacataaaatttaaaaaaaaaaacaaacccaaaacaaacaaaaaggccaggtggtggtggcatacacacaatcttgactgggggtgggggggggtgggaagaaagaaacaaaaagatcagttagttctcctttctgtctgtcctgatcacctgtgctctcttcatgaacccccatgcagctaccacaccctcctcactggaacttagttaccttgctagctttcagatgcaatcaatgactttcccttggtttcccttcttatccttctgtgtcttgtgagattgccgactctgtcttccttctcaaggacttatttactttttctgtctgctctcccatttttagagccgtccatcctcaatttatctttatttttttcaagggtcttttcctctcctcactattttttcttaatctatgagtgatctcattttcttgggggccaattgccatgcttattttcatgacttcacatttgatctgcagtcttggtcttaactccaaacagatgtttgcaagttgtcatgtgccaacctgacatgaagttagtcaaagaaccatagaaccatagaaagcttatagaaccaatggttgggtattccctacattgctttattccttctatttgtaactggtaccaccatttacatattgactaatactggaaacagactccttattcatctgccacatctaattagtaactaaatagtttactgtgagtgtgatctatttaaaatgttttcttatgtacatactagcttttttgtgatttattatagtaacttctaaacttttgggactatatagatggctcaggagttaagggccaaatactgcttttgtagaggacttgggttcgtttcttagtatccatctggtggctcacaaaacacctgtaacttcaacacatccaacaggcatgcagccccccttctctctctctctctctctctctctctctctctttctctctctctctctctctctcacacacacacacacacacacacacacactaaaataacctctatagctccattctattactgctttcttcctttctcttactatccaagttgttttcccgccccattaaggcagaaatttaagtttgtcatcattatcattctagactttttatatacctttatgaccctttatacacatctagattttacttatagctattttcctacaaattattcatttgagtaagagtggattacttagcattctcccattatgactagtttctaacatactgtgttctcaaatatggtgctcactcatttctttcttctctttaatgacagtgacggtcttctccctgcagtgccaaatcagccgcgccttccgccggctggtcttttcaccatggagaggatattatggaagcagggttttgtgtgtgagcatgcattttaatgttttttgagacagggtcttctgtctattatgtagctctggctgtcctggaacttactctttatacctggctggcctctaactcacagagatctgcctgtatctgctgtcaggagatagagacagtggagtcactgtgagtgtgaggccaacctgatctacatagtgagttccaaacctgctaagaccatatacaaagaccctgcttcataaaaacaaataaataaaagctgcacagatttatgattctattagtatggcttacctataatcatagtccattgtagctacagaacaagaatattctcagtaaatatgtgtataaatgagttgatacatggagagaaaataacaaaaagttagagacttatcttcctcctccagtgaaatgacattgtgctcttttggagagagggtctcagtatgtagccttggctggcctgaagttttacatacatcaggctggctttgaattcatagacatcaaccttcccggcctcccctttgctaggattaaaggtatatattaccacatctggggacaagtctgtgctcataggcttttaaaatttatttatttttgtattttatgtatatgaaggtttcttctgcatgtaattctgtaccacatgtgtatgtggtaactgaggaggctaggagaatgtggatccctgggacttgttatccaagtaacagatggctgtgagctgccatgtgggttctggaaattaaaactagtcttccggaagatcaggaaataattcttttttgttttgttttgttttgttttgttttgttttgtttttttcaagacagggtttctctatgtagtcttggctgccatggaactcactttgtagaccaggctggcctcaaaactcagaaatccacctgcctctgcctccaagtgctgggattaaaggtgtgcgccaccaccgcccatcagcagataattcttaactgcataagcatgatgtctccagcaatggacctttttttttcttttcctccaattttttattagatattttcttcatttatatttcaaatgctatctggaaagtatcccataccccctcccccactcccctacccacccactcccacttcttggcgctggaattcccctgtactgaggcacataaagtttgcaggaccaaggggcctctcttcccaatgatggccgactaggccatcttctgatacatatgcagctagagacacgagctctggggtactggttagttcataatgttgttccacctacagggttgcagaccccttcagctccttgggtactttctctaactcctccattgggggctctgtgttccatccaatagttgactgtgagcatccacttctgtatttgccaggcattggcatagcctcacacgagacagctatgtcagggtcctgtcaacaaaggactttttttgtgataaatttcatactgtaccctaagctgacctcagttgtggcaactcttcctgcctcagcttcccaaatgctggggttacagttgtaagccaccacagctagccttatttttggctttttgagaaaagggtctccccaagttggccttgatcctcctccttctgcctccaaagtgctaagaccctgtgtgctcatggtggacacagtattataaagaagttgatttatctcttgcctatcactgaatctcatgaggagcagaagtgtgaatttattcaagataaggcttcttacttaaccctcctatgaaggtattgctgctggaagtgtactaaacattaattctgcattgccagaggtgctgaagattgcccttatcctagcaaaatggattgacacagtagtagcatgcctatccttatgtgtgactcatccacctgtgatgtgtgtcaggtttgctgagcacagaatgagcctcattaggggtgatgattagaagctagggaagtgagtaagcctctgcaggaccaaccaaaagggaaaaacttggctaagtgctaacttgtactcgtgtcatgattaaggatgataccaaagaattctcagattagcgatgtcattgatgaacacttcaaatgcaagaaatgaaaaatagaagcttttgggggagagatggctcagtgtgtaagagtgtgtgctcttgcagaggacctgggctcaattcccagcatttacaggttgctcataaactgtctcttaactctagttccaggggatctgatgccctcttctgatatccattggtaccagacacacacatggcatacataacatacatgcagtcaaaatagtcatacacctaaaaataagatccatatgtttataaaaagttttttattttccttatcaaaatgaaactttaaaaatactgatgaaattttagtttagtgttttaagttctcaagtcattgtttgttttgttttgttttaaagacagggtttctctgtatagtcctggctgtcttagaactatctctgtagactaggctggcctcgaactcagaaatccgcctgcctctgcctcccgagtgctgggattaaaggtgtgtgccaccacgcccagcttggattctagttttatagacagtgaactgttcccactacgttctttactgtgtttattcatgcagagtgcagattccttgcaggtactttctagagaacatttctaagtacatggaaagcttcaacagagacctggaaacagctggtttatgcttttttgttttgggggattgaagcaaagactaggtgcatgttagacaaatgctaaccatgctcttacacctctatccctctgtactatttctcttttgagacagcgtactgctcagttgcataggctggctcttgagccagcatgtaggcctaggcaagaaacaggtcttaacctttagataatcttgcctcaacctcctaagtgactgggaagtacaggtctacctcattgtatctcaccgttatttgcctccatttgtttcaaaaacccctctcccgtgccccctttatctcttgattctttatcaagtgcagccttcctcctcacccttcccagactgaagtttccattccccagtaaggagctgtttgggttctgttttgtttgtttgggtgccaggtgtcaaatactgggctgatgacttctaagttggtttcatttcctagctgttgtgaatagttcatagtagtatacatggatgtgcaactgtctgtggcatgttggcatagatttctttgcccacgcttttggaaagttgtgggaatcttttcttgttcttttggtatttgttaactatttcattaaaaatttatacattagcttccattttttttcattcatagctagggtattccaattttcttttgctatttatggatagtagaataaaaaagggagtaattgccgggcgcagtggcgcacacctttaataccatcactcgggaggcagaggcaggcggatttctgagtttgtggccagcctggtctacaaagtgagttccaggacagccagggctccacagagaaaccctgtctcgaaaaaccaaaaaaaaaaaaaaaggggggggggagtaattgaaaacactattacactgccatgatattatgcctttaatcccagtactcaggaggaagaggcaggtagatcttttgagttcagggctctgtgagttcaaagctagcctggtctacagcaggttccaggacagccagagatagacacaaagagaccttgtctcaaaaaccaaccaagcaaaaaaacccttactatacttacacttctcactcactgaataattcaatctgacagcccttggggtgggggtgatggtcttaaaagtcatgtaaaggtgataatgtcctaaaaggaaagaccttgtgtggcaattgagctaagagtgagccctgtattgttagattaggattgctgtgttcttgtatgttaggacctggttttcagtgagtactgatatgtagaaaaggctgggaatgtatagttcagaggttgagtgctttcccagttataaagacatgtttgaattttggcagccatattcatatgtttattagccttttttattgagacttttattttttaacatttttacttttatatatatgtgcatgcatttgtgttgggatggccgggcatgtgtacatatgggtaagcatctttggagccagagggttgatgcatctgaggctagagttataggctgtggtaagctgcccaatgtggatactgggaatcaaattcatgttccctgcaagaggacatgttcttaaccactgagccatgtctccaacataattgagaagtcttaagagcaattatgttctcttgtcaccgggcatacttagctttagttgttcaagttcattctttacaacaaggaaacatggttccttggatgagtggctgatctctgggaatggaacaatatgtaatcccttaggtagatgtagtgacaaaagcttgtgttcccagcactcaggagtcaaaagcagaattgtgagctgaacagcagcttgaacaacactgccagattctggctcatagaaaaggggctggatatgatggcacatgcctttaatcacagctctaaggagacagacgggcagatgtcaaaggctagccagagctacagagtaagaccctgtctccaaaacaaaacaaataaaaggaagaaagaagggggagtttagaatgtctcaaatttctagaaagtacagattttattaccgattgaataaataaatacttaaatacaaaggggagatagtaattgtccagaagaaatgaacaggaaaaaatttagtattgaaggctgttgaagatgtcttgggaagacaccaaaagcataagttatatacagtttctaaaattagtgaattgtaatagatgtttgtgtgtgtctcctacttataattctagtacttgggagaccagggcaggagaaggctgtgagtcctagattcatctgggcttcagagagaaagactttgttcagaaaaataaagctgagttactgaatggtaatgtgtgctttcaattcaactcttgggcagctagggcaggggaatgctatgagttcgcagccagcctgattacacagggagttccagacaagctgcaaatacatagtgagacctcctcttaaaataaaaggcataaatgaacattttaaagttttggagaataagatcaacagattgactagggaatatatatttgaaataggcagactagaaaatggacagaaggtatgaatacaaaaggcagataaatgtgaacgtgaaaaacatcattagctattagaaatattagtatgtacttactaaacagagggcatactacctcagggctgcagaggagcttgatagaggctaatcaagctgatagcaatggtgtagctgtatccccaaaatctcccaagtcaggggttctctttgtaggctaagctggccttgaactcagaggtttgcctgcctctgcctcccaatagctgggattaaaagcatatggcaccatacggtgatacgactatttttcacaaacctgaatttacacttctgtgacctagcaaaatagattttttagcatcttagagaaatgaaaatcctattcttacacagctgtgtaagtgaatgttcataacagctttatttggaatttaagctcaagtgatcttaaattgggaacaacccaaatgcctttcagtaataggtgattagtaaatttatattgttggatattgctaaacaaaccattgatgcacacacacacaaacacacacacttgggtagatctcaaagaatttagattgagagtatcaggagattacataactatatttttatatataatttaaaagcttttattattgcctgtggatttatatatgtcatggcacaacaatggaagtcaaaggacaaattttgggacttggttctgtaaactcaggctgtcaggcttccatggtgaacactttaaatagtagctatttaccagcctctatttaacttttttttttttttttttttttttttttttttttaaagatttatttatttattatatgtaagtacactgtagctgtcctcagacactccagaagagggcgtcagatcttgttacagatggttgtgagccaccatgtggttgctgggatttgaactctggaccttcggaagagcagtcgggtgctcttacccactgagccatctcaccagcccaacttttttttcaaggcagggtttctctgtgtagccctaaaactcactctgtagacctgactggcatcaaactcggagatccacctgtctgtgcctctgcagtgctgggattaaaggcctgtgtccagctgacttttttttttcttcttctagatggttggttgtcctagaacttgctgtgtgatcaccagcctggctcatagagattgacctgactctgtccttcaagtgctaggactataggtgtgtgctactgcgcccagcctatgccattcctgaagtaatacagtgtcagtagtggagactgtgtttagtgatgcagttagaggtaggggtgagaggaatgggactcagtgtgaaatagcacacagtacctttggtgatgtaatagttctatactacaccatagttacatacatatataaagaatacacagaaatgaatgcctgtaaaaatgggagaattccagtaaggtgtgaattggaccaatatctttccatggttttttaatttaatagcccgttgaagttggtcctgggtagcataatccaggcgaggtgggagtcagtgaggaacataatggttctgattaccaagagcttcatcttaaaaggcaaatcataatgagttcagggcctgagggaatgttccttccttgctaagtgactgagaatcttgtcctacggtagcattttgagcaggcccgtgtagaagccgcagttcattgtctggaagctctgctggagaacgtgtactggatggtgcagccacagtgcacgtggagagaactctgagtggggatgcatggggtgccctccagaactacctgtatttagaacttgggggaagatgaatgaagcagaagtttcaaactactaaaatcttttagataaaataggaatgtcagagaatttgtagttgtcattggaatgtttaaggctgagtctttctgagtagtcaagccgctccatctgtcgtttccttcatatgctgttttcttttgcaacactctgcttaacatggggtgtgattgcaagtatgtggcctctaagagaggaacctagtattacattgaacctagtattaaattaattggacatgattttgtttaatacaaacacatagactgcaacaattgtgggtttaagacagagtctcacattggttaggagttgctgaggctgggatgattttgaacttgtggtatttttgctgggatgacaggcctatctgttaccatcctggttaggagggactaggaagttaaagctctggtgttctaggccagcactctatcttttgagctacatcctaagcactaggactctagctcagaataatggaattgccttatttataggccctagtgaggtcaaagtcctccttagtcaatacatggaattagggtgctaatgattgaacatgaccttatggaaactcttatctagaacttccttattcctcttctaagtctgatcacacagtgtgattggggttgttcagtagtctgtagctgtgaactgttctgtgtgattgaaatccttcagtttaagtccctctagtctgaaaagaatgatgactttctacctgatggcagcaaaaagggcatgatagtttaccatctgctttataaggttatgaggattgaggcggtgaccgcctagtaagatgcgtctggcatatcataatcactaaacagtgctttctgctagttcaagttgattgtatggtcagtgagaagctatttataggtttgtttgttttttttttaaattgtaagtaagcaggtgaagtgttcagacttccatatgtgctaagatttatatttcttcattaaaatgatagtggttatgggacttagatttagttctgtctttgtgtaggactccttgctcagtttatgaaaaaaattatatttattttatcagtttttggagttgaacagtgttgacatagttataagatgtgctgagttcttatcaggaaagtaccccaagtagagattaggaaaatgtaaggaggaaaaataaccagtaatgctatcttaatagaattgtcctgtatttgctcaacttgtgagttcataattggcttctgccatgatgaacatgaaccttgccctctgtttgacatgtgacactctgcagtagcagaggcgtttacgacagtgatcaatgggggaatatcctctgctcttgttcttttcagtttattgtgaatgttgaaagaggaagcttctgtgtgcgttagccacaggctgagcaagtcatttcttgagagctgagacaatttcccagaagacactgagagtgggaggcagagagacttcgtcagaagtgggtgggcataatttttaatccaatgttttagttacagtattgttagatattaaatttcataattcactaattcactcaatgataacaattaagaacaaataatatcctacagaataataaactgtgttccttacagtgctgctgctgctggtactgttagaagtggagaagtgtgattcctgtgaaaaagtggtttcttaccttccccttcctttaccttttaaaagatgggtgggcaggggctcaggaaggtgcgggagaatatgaatgagccacagaaggctgagcaagtactgtgagctcaggtgcctttggtgatctcactttagagaggctggagggaaaaggtggaagagcacaaagcatgtgattttctgacctttttaaattgtaactgtggagtcaaatgtttccttgttagaaataaacaagtcagggctccaaagagcaggaagggaaaggactcaagttcctggcatctacatctgtcagcttacagggaagccctttttggcctttaaaagcacccacacactcatggctcacacacccacatacatatatgtagtgaaaaaaataaatctttaaaagaaaattcaagccgggcgtggtggcgcacgcctttaatcccagcactcgggaggcagaggcaggaggatttctgagttcgaggccagcctggtctacaaagtgagttccaggacagccagggctacacagagaaaccctgtctcgaaaaaccaaaaaaaaaaataataattcaaacagttcacagatttgggatcagctaacactactggaccagggaaaggaagcagttaactcccgggttgggagggaacctgcatgtttattcagactgagcatgtgtaagtgattcctgcctgcttagtgaatgccagggtcctttgtttttgttgagaattggaagttgtgaagtcacagtttcgcaaggttttggtgggaatttcacttcctgaaatgtatatatgtgtgctctttgttagatatttcagggtggtgtatattaattaacaccaaaaactgtctatggttttctttttagaatctcttttgaataaaagtttgtgtgtgtgtgttgatacagggtcttatgtatcaaaggcctggaattcactatttagaccaggctggcctagacatagacactgacagtgttaacagtgtgtgcaccatgctctgttctcacagtctttttcatagaactaaataatgacattgctgtgtatctgagagtttgatttcctgataagaacatataaattggggctggtgagatggctcagtgggtaagagcacccgactgctcttccgaaggtcaggagttcaaatcccagcaaccacatggtggctcacaaccatccgtaacaagatctgactccctcttctggagtgtctgaagacagctacagtgtacttacatataatcaataaataaatcttttaaaaaaaaaaaaagaacatataaatttagtcaccagctgtgcttaattctaaaaacctattatgttttcctaaagattacttactgttttctattttcgtctgccaacaaaactttaaaacttgttttctaaaccccatagaatgcagttttcctttgctgacttgataacttgttaggaagtgatgcaaagccctgtagttgcacaggaccttgggtgactttcacgtagtagccagtgcactgcactgtgcttttagtcattgggtatgattactgcaaagttttgggttaaagactgaaagaacatatctgaattccaggaacagagaccactgcttaagctgctagcttttttctagtcttagcgtctaaaccctgccttggtctgggaaggcattatgtaggcaaactgaattcctagcaccctgtgtggggccttaacatcttgaggtgtgttggtcaaaagactgtatgatttgtgtgtgttttggtttgtattcttcctgtgattgcaacatgagggaatgcatccctttgcaggatactgttgtggaatttacatttttgtggttgtattgctttctctaagagcttacattcttctgttggtgtgctatccaggaaacataatggtctttattctgttaagtaggaagctgtccagtatcttgtacagtgtgtcaattataagatgactaagctgttaagaaaacaacaattaaaaaaaaactttttaaaaagtgcttgctgacatcatctttccccaaagactaattaatatatgtgtttactatagcaagatcatagttgttctgttgtcaagtgacatgtagtatttacagaggccttctgttcagtccaacaggagcagctgagatagattcatacggaaactaaagatatttaacatttttattcatatgaagaatagtgtctttgggtcttattgctgtggagacacatcatgaccatggcaaggcaactcttataatggaaaatgttgaattggggcagccttacagtttcagaggcttagtctgttatcatcatggtgggaaagaaacatggtggcatgcaggcagacttggtgctggtgaagaagctgagagttctacatcttgatccatagcagcagaaggtgactgtatgccatactgattgtcaccttcctccaacaaggccacacctactgcagccttctaatagggccaatccctgtgggcctagggggaccagttaccttcagactatcataaatagtttagacagtttggggttttgttttgttatagttgtctggattttggtttaaaagtggttgctcaaaagctagttaaaatagcacacacctttaatcccagcattccaggaggcagagtcaggcagacctatgagtttgaggccagcttggtctaccacaaaaaggtgtggggaagagggagaaagaaaaaaaaaagggagtgagtggtgaggttaggagtagcctaaactggggagaggtagtggtaagaagattaggattttaagatcattctttgctgcatattcagttgtgggccagcctgggctacatgaggccctagcttaaaaaagaaaaagccaagagacagtggaaagagagtgactatttagtatagatttctttgaaaggagtagtttatcacaaactatattctctgaagttgaacattatacattctgttagtaacttagtttatgcttgtgtctttttttttttatgtttacgattcttaattaaagttcatcttggggataagtgcttacatgctcctcatctttttttttttctcatctaaatgatacaagatgttgtattttagatgttgaaattagcataaattctaaatccgaaaattttatttttaaaatgtagaaatgtgtctaacctgttaacataatcgtaagtaatgaagtgtttccagtactcttgtaaagaatacagtttgggtgatccagttattttagcttttccgtgttaagaattatttaaatatacttgtatgcatgctaccgggaaatgataagtctgttctcagtttgagcccagttatggttttgcagttatggttttcctcagtccctgggcactgagacttgagatggcgtttcacttctgggaaggtaagtgtcttcttcactttactgcactttactgctgggcagtgtctcaggttactgtagatagagtgcaaacagaagcactttttttccaacacccagtaacaggattatagtctcacttccttattctaaaaatagaaataggtaatttaggacatgtctcaactctcctttggtattaatttatgttttctttatttctcctatcatctataactaccttaaaatattaaaatcaaataaaaagtatgaaaagttgaaatgacagttatgatttatcattctctactttcagatgatcacagtcgtgttaaactgcaaagtactgaaaatgattatattaatgccagcttagttgacatagaagaggcacaaagaagttacatcttaacacaggcaagtggtatggtgctgagcagaggtggaggggctgctgtgtttcagacacggctaaacatgggtctggacatctgcaaatgacatgctatcttttagttttctgattctgaaatcagttttgcaaatgccatagttttcagatttcgaatatattgataaaaagtaaaattgttcctaatgttactattttcaatggagggaagttttttgaaatgtcttggtgcagttctcttcaggtaaattgactgtatctaacatggcttggagttcttgtcccctaacttgtgatgaagaactagagaggccctggaagcccttttctatccttctctcccctatgaatatactttcagagagtatagtcatggatgctgaggatagggtctgaccatctgcagagcctagacatttgtacactgctgctctgctgccttttctcctccccagtggctcctcacagcaacctccacagtgcaggaactaggaacttctgagatcatagcttactctttatccagtaagaggctaaacagcaaccagcactgtcacatttcccagtcaaagatgttcagaaatgtaacttaaaatatttgagagttttaaattgtatttgattattatgtgtctctgtgtgtatatttatatatacatgtgcacagggtgtccacagaggacaaaaagaagtggcccttagcactgaaattacaggctgttgtgagctgtacaacatgggtgctaggaatcgaactctggacctctggaagagaagaaattgtccttaactctatctatagtaccatgtttgaggtttttaaaaagccaagaggttaatgcaacctgctatttgaaggactgagaaaagtgtgaagtaattgtttttttaagttcagcctaatgtacctgtgagccattagaattttctctgctacagaaacattgtttcacttgaagtttcctatgactaaaaggaaggagaaacagtcaggtgtaaaccttgttaaggatattaattcacaattcataggacaaaagaaagctagagaatagggctggagagatggctcaaggtttaagagcactgattgctcttccagaggtcctgagttcaattcccaggaaccacatggtgactcataaccatctgtaatgagatctggtgccctcttctggtgtgtctgaagacagctatagtgtactcatataaataaaaataaataaaaaatttttaaaagaaagctagagaatatacatttgcaaagatgctatgtttgtacatagcataaagtgggcccagtcactgagcctccaccaaggactcagctgctttcccctcaggccgcctctctttcctctcctcagatcttgtcctgcccttgccccctaaccttccttctatagtcactttctgaaggtagtttacacctaggagaaggagtgtttgtgagtcctttgagaacttttactctgttgactcctttgctcatccaaataagagtgatgagttgcttcctgctaggcacacacttgagatcaacagaattagcaggaatatcccaaccgccactctgggattgctagtgtccatgcagctaggtgtagcattatgaaatagatttgcctgcagtggtaattcagctatactgagactaattcctgaagagacaatagtagttcattgcagggagagtatataatactcagtggtcacaatgtgcttgagaaactgacctgagaaattctacatgtgtttattccaacctcagtttcacaagagggctggcatgggttgaatgatgaatcatacacataccttttagtagccgtctttaatgcgaatggggagcataaactttaatttgctgttttatagtgagtgaaatttatcttatgtatagtcataatcatttaggatttcaaaaaaattcaagaaatctatattcagaactgaaaatggactttgtactgagaatgagtgtgggcatgtggaaaggcatgtgtgaagttaggctctcgttgctatgacaaatacggaaaggaaaactgaaaaggaaaaatcatttatttggcctcaaatttccagagatatgactcaaggtcagctttaaggctaaggtgaggcagaatattgtggcagtgtggacgaagagagaaagagctacatgacaagggcattcctgtgacctgcttccccctcttaggtaccacctcctagtcctggtacactaatctaccaacagattaacctttgattaggccagagccctcccaagcatccatgagatgacatcaggcctgcagcactcgagccccaggtggagcctttcccacctaaaccgtaatacagctattccttctcctgccctttccctccagatcattgttcttctttttccttttactcagttcctacagacaggtctgtctgtctttttttttcttttttttttttcctcttttttggttctccaagacagggtttctctgtgtaactctagctgtcttggaacttgttctgtagatcagaccggcctccaactcagagatctgcctgcctctgtttctctgagtccagagattaaagtcataggccgccacctgggctaatgattgttttataagcatctatatctcatatgaaaaaattcctgatgaacaattccatggtttttaactcagttatccctgttggactgttctcatgaatcctgatagacaggactctacacactaggagtgtgagaatatagcagcttgtctctagatttttttgtttatttgtttgtttgtttttttgttgttgttgctttggtttttgtttttttcctgatttcctttctgtattctggtgtacttttcccagttttctaccctggccttatgagttgctcagttccacacacatcagtgcagcattctaagatgtttccttgcaaccagctcttcagacatggttcgctactgtgatactcccacatctaccatgtgccctggttctttgtgtgcctcaccttctgcttaggacatgcagagtgaccataactacccatgtcctgcctatcacctctctgccagacttgccttcctttggctagactgtaaatcctcaggttttcttacaacataaggcctgaggattgagcatttggtggtagtgatgctcctctgtgcaccttgtagggctgagactacatctcagttgtacttgtgcatagcatgttacttggtcacagagaaaacctgcaacatttagtgtttgttaactacagtggtagtccttgttgcttattaattagattagctttctttcccctgagttttaggatttcttttcctaaccaaccccttggtatatcatgtccattgtacagtttaaaaaattggtagcattgctagtttttgaaagaactgatacacgaaaaaattcttgtcttcttaaaatcctttattctttatactgtaacagctgttgcatgtttattggttagtctttaaaagcagtattagaaatgatgtattcatgtgcacacagaggacttcactcctgagttgcttcatgattttttttaaagttttatttatttattttaatacagatggttgtgagccttcatgtggttgttgggaattgtttttaggacctctgctcgctccggtcaactctgctcaactctgcttgctcagtccctgctcactctggcccaaagatttactacactgtgtacacagtacactgtagctgtcttcagatgcacaagaagagggcatcagatcccattacggatggttgtgagccaccatgtggttgctgggatttgaactcaggacctttggaagaggagtcagtgctcttttccactgagccatctcgtcagccctcatgatttttttttaaagtgtactttattttcatatctgtatataaattcccaatgaggccagaagagagagatctggagctagagatatgagtaactgtgagccacaccgtggtgtcctttgaaagagcagcaagtgcccctaacaaccaagccatctttctagtcctgcttcatgattgttgtttttgagacaagatctcactgtgtagccctaagtggcctagaactcactgagtagacaggctggccttgagctacagagatcctcactcttctgggattaaaagagctcaactgggcccatgcgccaggcgtggtggtgcacgcctttaattccagcactcgggaggcagaggcaggcagatttctgagttcaagaccagcctggtctacaaagtgagttccaggacagccagggctacacagagaaaccctgtctcgggaaaaaaacaaaaaaacaaaacaaaacaaaaaagcctaaaaaacccaactgggcccatgattttttttttaattttttttcttaaaaagaactaattattttattcaatacgagtacactgtagctgtcttcagacacaccggaagagggcatcagatctcattacagatggttgtgatccaccatgtggttgctgggatttgaactcaggatctctggaagagcagtcagtgctcttaaccacagagccatctctccagcctccccataatttttttttaagatgaaagaaaaaggcatttatgttactgggggttttctcagtgttctttttggtagagaagatgatgttggttcacctcactgtatgctttatattgtaagtagatagtgtacattggatggagagaatagtatcctttaatgtaagggggtcgtttctcagattactagctttttacaggtcaacccgagagtttatccatctaagtgattggctagacaccaagaaataatctgccctaaagatgatttaccttctaattggggtggggtgtagctctggtattgtattctctgccacatgacactggtagttggttacatgttacagttactttaggcacagtggaacttagttctatttcagccttcactcagaattattaaggattctgtcttagtcagggtttctattcctgcacagacatcatgaccaagaagcaagttggggaggaaagggtttattcagcttacacttccacattgctgttcatcaccaaaggaaatcaggactggaactcacacaggcaggaacctgggggcaggagctgatgcagaggccatggaagtgagctgcttactgccttgctcagcttgctttcttagaaacccaggaccaccagctcagggatgacaccacccacaatgggccctcccaaccttgatcactaattgagaaaatgccttacagctggatctcatggaggctcctttctctgtgataacttcagctgtgtcaagttaacaaacaaaaccagccagtgcagatgaaggtcggttgttagagtatctacctagcttgtgtgaggccctccgttacatctccagccccacataaaggaggaaaggaagtgacggttggacattctttttcatctcatggcttggtttttttgtttttgtttttgttttttttttggggggggtggtggaggttgtttttgtttttggagacagggtttctctgtgtagccctggctgccctggaactcactctgtagtccaggctggcctcgaactcagaaatccacctgcccctgcttcccaagtgctggggattaaaggcgtgcgccaccatgcccggttcatctcatgttttttattttttgttttttatttttttttgttttttcgagacagggtttttctgtagccctggctgtcctggaactcactctgtagaccaggctggcctcgaactcagaaatccgcctgcctctgcctcccaagtgctgggattaaaggcgtgcgccaccacgcccggctctctcatgttttttaaaaaacccctatgctatcattaatcgaaatgtaaaagtaattggaagtaatatatttgatttttcctcctccattgcattttgtaatatgaactattattcacttttaattctgccagatgatactaggcataacaaaccaatatgcaggtactttcatggttatttttttttttcctgcaaattcttttgtattgacttggggttgttggttggttagtaatgaaataaacttccctattttccacagttccctgatgtttgtgtgagatatcacctgcctgttacagaaactgaaagagacagatttccttttctaacagcctttttagctagaatacgaacagccaggtggtgttatactgtaggcacctttggtaataacagcaaagccatatgtaataagacagtgaactgtgtaataataactatataataagactaatgaacaaggctggctctgtttcggacagaaatcttagctgtattttatagttgttatttgaacctagttatccagctcttcccataagccctatatggttcttttcctgccaaggtaaagaaaatgtctttacatggaggtaaagttttattgaatgcacactatattttggatttaagtgcatttgaagtcttaatttactcatcaggccccaatgcactggttataacagtgtgttccagtagcatccttgcagccttgtccttccccagcccctctctcatgtggtcttctgtcgttacagggcccacttccgaacacatgctgccatttctggctcatggtgtggcagcaaaagaccaaagcagttgtcatgctaaaccgaactgtagaaaaagaatcggtgagtattcttctcttctcttctcttctcttctctcctctcctctcctctcctctcctctcctctcctctcctctcctcttctcttcttctatcttgtttgtgtgtttgttttgttttgtttttttggagacagggtttctcagtataaccagccctggctgtcttcactcactgtgtagaccaggctggcctcaaagtcacagagctctgcttgtctctgcctccttagtgctaggatccaaggcgtgctccaccatgcctggctggtgagtcatattcaacattagtggttgaatatgccgcgtgtgtgatgtgtgatcgttatcttacacatttcttttattttggtgaatgcttgtggtggctaacagctagtggccaggttatttctttctttttttttttttggtttttcgagacagggtttctcttttatagccctggctgtcctggaactcactttgtagaccaggctggcctcgaactcagaaatccacctgcctctgcctcccgagtgctgggattaaaggcgtgcaccaccaccgcccggcagccaggttatttctgaccaggactaatggatactttgctttcctttcatttctttacagttttttaaaaatgcattttatagatttatagtaatacatatcttattctgctacataagcacattttttataagtataggtgatatgttgggagtattccctactttcagccctcctttctcccactctcctattatcttttttgtactccccgacagttctactactgcttttgtgtctgtctcctagattttgtataggtaggtaccttaaagcacacacacacacacacacacacacacacacaccacttctctttgtgagattgccatatttcatttggtacatttatcttagttgcatctatagttctgcaaatgacataactttgctgtttttggttaaaagttttcattctgtaaatataccacattttcttcatttttctgctgttaggcaagtgtattggattctcaatttaggttttgtgagtagtgccttggtaaatgtcaataaagtataaatctctctgtgatagacctaccttggacttggagtcctgtggttagatactcagaagtgatatagctgggtcatattgtaggtctatttcacttttgtgtagaacctctgtacagatttccatagctgctggaccagtttacattttgaatagcagtgtgtagcggctcccttttggtcacatctttgccagtgttttgggtttggttttggtttgtttagtggtagtggtgtcactgttgaggttttcctttattttgtgtagccctggctgtcctggaactccctgtgtaggccagactggcatcacagaaacctacctccttctgcctcctgagtgcccgaattaaaggtgtggattgctgtgtccaacagttctttcttttctacagtcatcctgactagagggagatggaaatgtctgtgcggtttcaatttgcatttctctgatagccagctagactgaaaactttttatgtatgtaatgacatttgtgtctcattttgtctgttcattagcccatttactgattgggttgtttgtctttttgtttaattttttcagttctttatatattctagctattaactgtctgtcagataaattaggtagcaaagatttttctcctatttggtagattctgttcatttaactacttgcttttctatgcagaaacttcttaatttcatgaggtttcttttgtcatctgtttgcatatttttcttaagtgagtagagtcctgttaaaagtcattgcctgggctggggagatggctcagcagttatgagcactgactgctctccagaaggtcctgagttcaattcccagcaaccacatggtggctcacaaccatctgtaatgagatcagacgccctcttctcgtgtgtctgaagacatctacagtgtacttagatatataataaacaaatcttaaaaaaaaaagaaaaagtcattgcctagggtgtctgtctgtatgcgtgtgcccacgctagggggagcagagtttattcttcagtgctttctgctttatattttgagaccttcttgggtcctgttttgactggactggttgtgagccctcaggatctgcttttatgaacccacccactcctccccagtgacatctgcatcagaaaccacatggatgaagctgccttggcttctctctgggttctctttctcttgggttggtttgtggacctgctgcttttgttactatgactgtgtggtatgccttgaaatcatgtctgattagacctctagtctttatgtttgttttcttttctcaggcttgcattgcccttccccccaggcctttagagcttttgtaagagcagtgctgggatcaaaggtgtgtaccaccactgccaggctaagcgctttaagatttttctgagatgtactttcaaatagcattggaattttgatggggattgcactgaatctgtagattgctttggatagtatagccggttttacaatattaaccagtctacatacttttcttcctttcttctttctgtttgtcaatattggggactggacctcagcctttatgcctgctaagcaagaattttcccagctaagccatagttcctgtgggcagagaaagtcttcagggttttgtctccccccccccctattgttgtagcttttgtagagatttttctttacctaggtttattacatggtattccttaatgcagttagaatgagcttctatccttcatgcgttgtgagcatgtttgttattgagataatagaaagacttctgattttatatattatatattaatttctatcttgatgcaaagacttctcattaatcctgaattttcttttgcagtctttaggatcttttaaaatggaatgattttatctgtaaagaaggatacataggcgtcttcctttcctgtttgtacctcactcattttcttctcttgctttacttatgattgagacttcaagtgtcatgttgaataagggtagagaaagatgagaacttttgtctttctcctgatttagccaacatgtttcagatttttctttggtgtgatgctggcttttgggttgtcatttatagcctttattgtgttgaaatatgttcttcctattcctagcctccttaggacttttattatgaagggatgttgttttaaatatcacgtatgcaatttctccttgagtcattttacgtagtgaattatgattggtgatttgcatatgttgaaccacccttgtatctctgggatgaagccaacttgatcatgatgaatgatctcttatgtcttgaattccattactgatacttattatagtgagaactttgcagttttgttatttgtgtgttggtctttgtccgacattattattagagtgatgctggcttcataaagtgaatttgctagcatttgttttgctgattcttagtattgtttctttagtttccatttcattcacttctgcgcaggtgttaattcttaccatcccctactttgggatgtgcgcgcatgtccagtttccatagctagcctatctgagatctctctgatttatttacttacttgacacttagagctataaacattcttttgagaactgctttgtatccagagagtttggaatgttgtgcaattctatatatttttctgtttccagcggctcatatttctttcagtggtgtgttttcttttttgtttcctttttgcttggtgtgttgttttcagtctgtaaatctgcatggtttctgtagtttctcctgttgttttgtagttttgttcctttgattttctataagattgtgtgtgaatgtttcctgaggcacacatctgctagctccaggtagggcatcagtgatagaaacaaagtgtagtttggcaagctaatgaatggataggtgtgagattatttttagaaacattgggaattaagtggctctactactaccaaagaaaaacaactctctgtgagactagtaatttttggaggcattgtacggccttggctttttatatttcctttgtttctcttttgtatatatgtatctgaggttaggctgttttttgttttttttgtttgtttgtttgcttgttttcgaaataagtttgtagtgttcagtaagatctgggttgtagtagtgttgaagtgtttttatctgttgggctctttttcagaacaccagactcaatatccagtaactcttgacagaagtattacacctttataaacaatcactaattaagagtaaacccattataaatatatagaaataatcaagtagcactcagtcgccacttacaccccaagcatttcagaaagtaaaggaagccttatagaatcaagccttgtttactgagctgctagttactgtgagtgtgactacaagaaaaataccagagtgcctcacagttggtattaggttaatagagaaaatctcgaggatgagattagatgagagtcagcaaggccaagtagaagggtgagtcagttttgcctaaaggtaggatggaaagggagagctaaagaaatggtttcaggggttaagagcaaacactgctcttgcaggagcccctagttcagttcccacacctatgtggtagctcacaaccatgttatttcagcttcagggggactcagtgtcctttctgagttcaccagacactgtattcacatgcacaccccctgcaccacacacacaaacacacacacacacacacacacacacacacacacacacacacacgctttaaagtatgtttttaaaaagaaaaagggccaggtgcagtggtgcatgttttttatctcttcattcaggaaacagaagcaggaagatccctgtgagttccaggccagataagtaagaccatgtcttaaaagaaaggaggagggctggagagatggctcagtggttaagagttccgacagctcttccagaggacctgagttcaaatcccagacaaccacatggtggctcacaaccattaaatcagacgccctcttctggggtgtctgaagatagctacagtgtacttacatatattaaattaataaaaagaaagaaagaaggaagaggagtggaggatgttatcagaaaacccaatatctataatattttgccagttcaaattataactaagatttatgtgtctttagactctttttctgtcaaaattagaaagtcttgactcttaagattatttccagtttaaatataccacacacacacacactcacatgctttaaagtatgtttttaaatctgttctatgacagatttctggttcttaattcttcctaaattaatagttactgggttttgatgataatgtgtatcatgacattggcctaacagaatttccaataattgccatctgtagttgttttccgtcctctcccactaatctagagattcaggggtggggcatagttttgtttgtttgaatgtgttgcaaactagatgatttgtaaatttcatccctctcacgtcaaagtagattcactttttttaagattcatttcttttatgtgtattattttgcctgaatgtatatatgtgcaccacataagtacctggtactcccagaggctaaaggaagacatcagatcctctggaactgggttaaggcatagtgtaagacaccatgtaggttctgagacctgtgtaggaggaacaagtactcttaactgctgagccattcctttagtcccttgtgggcattttaatctctggttcctttttttttttttttttttttttttgttgttgttgttggtgggggtggttttttgagacagggtttctctgtatactcctggctgttctagaactcactctgtagaccaggctggccttgaactcagaaatccgcctgcctctgcctcccgagtgctgggattaaaggtgtgcgccaccatgcctggcccttaatctctggtttcttaagtgtcagtgaaagtgcatctgctcttttagtacttaaacgtcattttggcagggtataaaaaacttagctcttgcttttacttgaatttaaatacattcttttcattttagtgttttagattactgtccaagtcaaatggatgtcatttttttttcttgtacctatattacgctggggttttctccctttttatttatttttttaaattttatgtttatgaatggtttgattgcatatatatatgctaccatgtgtgtgcctgttggatcccctagaacaaggtttatgggtggttttgtcccatcatatgggtgctgggactcaaacccaggtcttttgcaagaacaagaagtactcttaacaactaagccgtctccctacctagccaggctctctttctctttaacattaacttttgaaactgtatcttaccacttgattggctttttgcaagtaaatagttttgtcctttaaatagttgcaaatgcttttttttgtgtgtgaaaaataaaaagattattaaattatatttgggatttgttctgttcctgtttgtcattgctggtgtttttgaggggtgtgtgtgtgtattttctttgtatttgtcctgctcttgttaatcctgtttctatttctctctatttactgtaaaatgtccttcttgtcctcttaagctttatccattacacttatcctgcactacagttctaggtgtcaaaacaaaccaaaaggcttattcttctgattggctgtcctggaactcgctctgtagaccaggctagctttgaacctagaggaaagccgcctgcctctgccaaacaagtgctgggattaaaggtgtgcgccaccaccgttcagggtgacagaaagcctctttagtgctctctgaaataacattcttgcaagagcttgatacttctagaaactcaaactgaatatgttaaagtgtaattatgctttaagaacagcacacttttgggttgggcatggtaacacatgcctttaaatccagcatgtgggggctgaagccagcttgatgttcatactgaattccaggacagccaaggctatataaagagattctgtctcaaaataaagaagagcatattttaatgaatattttatgtttatggctttttaaatggaaaggaaacattttatggagctactttacagaatattctcattaaaatacttaagatattcttaggtttcagtacttggagaagtatagtatgtatgtgtgagatttgtttttatggttttataatatgtctaaactattcttaaatttaggttaaatgtgcacagtactggccaacggatgacagagaaatggtgtttaaggaaacgggattcagtgtgaagctcttatctgaagatgtaaaatcatattatacagtacatctactacagttagaaaatatcaatgtaaggcttttcttgtttcaaagtttcagttttatctgatggtcttaagaattcttgggggttgatactatacttacttgcctttggatatttgtaataatatctaggtataagcatgtttttagagtatttctatataaagtaactctttatgcattctgaagaattctaaaaacaacaaagaattacaatgttcaggttaatattaatatttaagaattgaaaattaactattggagctggaaggctggctgtagtgttcttgtagaaggcccaggttcagttcccagtacccatgtcacgaggcttaccactgcctgtaactcctgctctgggaaatccttgtataagaaaaatgctagaactaacttctccttgatttttacatttcagactggtgaaaccagaaccatatctcacttccattataccacctggccagattttggggttccagagtcaccagcttcatttctaaacttcttgtttaaagttagagaatctggttgtttgacccctgaccatggacctgcagtgatccattgcagtgcgggcatcgggcgctctggcaccttctctcttgtagatacctgtcttgttctggtaagtgtcatgcgatctcattggtgttttgtgcttctctgttttgttttatcattttataatgttgatgataaaaagataaataattttgcatgactggtgcctgaggaggttagaagaaagcattgagtccctgaaactggagttgcagatagtaagaccctataactcgtgggtgggaaccaaaccctgatcccctttaagagcagccagtgctcttaaccactctgcctgttaatttgtttttaactgtttctataggcagcagtaaattttgaagtaatatcccaaaactctagggttttttttttttaaacactttacttctatagtttaaattgactctagctcctgcaggtacatgtgtgtccatgacaattataaagattccctagaaagtctcaaccaggcttggctcgtacctttcatcccaacactaagtaagttggggcagaaaatttgctccaagtttgaggttagcctgggctacggagttagaccctatccaaaataaaaaaggaagaaatgaagaatacagtaaagtctccctcctaaaagggagaaatgacaaaggaaagcaatcctgaaagagtgactcatgcctgttgtctgcacgtctgagccagccggggttacctagtgagattcacctcaaaaaagaagagaatgccaacgaactggggccatggcaagcatgagcactgactcctagtgcatgggtaaaagatgagcagagtagcacatgtctgtgaccccagaacgtggtgaagggcagttaggtgggtttaatatagtttactgaccaccagcttatccaagtcattagctccaggtccagtaaaaaacactgtctcaaaaatggcttgaattctaccctagaccctactgggtaggagaaaactacctccaataagttgttgactttaaagatttttaagccactgtgctggtacctgtctgtaaccccttgcttgatagaggcaagagaagcaagtccatagagagtttgagcaagtctgagcaacatgagaatttgtttcaataccccctttctttctggtactttgtatacagaattaaaagcttctaccttcagcaataaatttttaaatttaaaaatgtgattttttttccttcttggataagtacatcatctcttatttataaaccaaggctaaaaagtacttcccagggttactgtgataattctgtatattaatgatattttctgtcctggttaacgtcagctaacaacttgacacagcccagagtcatctgagaggagtgcctcaattaaagaaagactttttaagatcagattggtgttatttgtagggaactaattgatacaggacagcccagcccactgtgagattatctgtagagagaatgtcttgtatattttatggatacaccacccatcaattaaaaagcctatggcttaggcaggaagtaggaggtgggacatcggggaggcagaaagagttctgggatagagccaggcacgggaggatttgcccaggaagatgtgaagagatggatgtggggtacctgaacacaggtaaccagccgcgtgtcagaatgtaaattaaaataaatgggttatgggctggagaggtggctcagcgggtaagagcactgactgctctttcgaaggtcctgagtttaaatcccagaaaccacatggtggctcacaaccagccataatgagatctgatgccctcttctggtgtatctgaagacagctactttattgttattattattgttgttgttgttgttattagatataataaaaaataaatctttgggacggagcgagcagaggttctgaattcaattcccagcaaccacatgatgtttcataaccatctgtacagctacagtgtgctcacatacattaaataaataattttttttttttttttttttttttttttggtttttcgagacagagtttctctgtgtagccctggctatcctggaactcactttgtagaccaggctggccttgaactcagaaatctgcctgcctctgccccctaagtgctgggattaaaggcatgtgccaccatgcctggcaataaataaatctttaaaaaaataaataaattattatgcttaaacaaaccctaatgggctactttaacattttgcctagacaagttatagtttcaatcaaaacttgaattgttagagctgagaggtggctcagtgatgaaggacagttgctgctctttagaaaactaatgttcggttctagcacccacagtgggtgactcacagccctctccagctccagggatcacatgctgtcttctggccgctgtgtgcatctctacacacttggcatgcacacatacacatgcactcacaaatctttaaaaaacaaaaaactcatttactaataaaattaaccttttgcttaaaggcagtagattctgttaatgatcaatattaaaactgggttatgagaaccggcggtctttggcagagtgtttgcctagcatttaagggttcatgagtttcaaactgcattggatgttcatacctgctctctaccaactgtgccttgctcatccttccttctcttcagtttatggtttgtttctaaaaccagatcagtagtccagagctcagaggtaattttgtaggtcaaggctttcctatttcctgccatcttttaagtgtctgctgtacatccacaaagcatgtctttgtccagatttgagatggggaagggcactgagcagcaaactttatctctgacaaaaccattttttaaaactatataaataatcctaatcatatctgggtgtctgtgtgcatatttctcacccccccccccatgtgtgtgtgttaaattatccttcttttaagaaggaacctgttcacagctaaggtctgagcagtgagtggccttatattgctttttttttttttcaactcaaacaacttggttttacctttcttgcagatggaaaaaggagaggatgttaatgtgaaacaattattactgaatatgagaaagtatcgaatgggacttattcagacaccggaccaactcagattctcctacatggccataatagaaggagcaaagtacacaaaaggagattcaaatatacaggtaaactcagtatcattagtgtcaaataaccatgttccatctaaatcctcagccttcccctacttcatttggtagatccagctgactgtctagaattcataaaactttccacagttcaagaggcaaagatgaaagctagtcaccaagagttcaagaccagcctggtctatacagtgagatcctgacttaatttttttttttcttcaagatttatttattattatatctaagtacactgtagttgtcttcagatgcaccagaagagggcgtcagatctcattactaatggttgtgagccaccatgtggttgctgggatttgaactcaggacctttggaagagcagtcggtgctcttaaccactgagccatctctccagcccccaatttttttttttatatgtatataagacacatatatacatatatacttgtttcctcagtggaaacaagattcaattaaaataatttttttcatatgagaagatttcagcatttaattattgaaagaaaaaaaaacccagaaaacataagtacttttatcttagtaaaaacttactgtagaggcctgaggagatggctaagtggtcacaggttacaagcacttactgctcttccagagcacccaagtgtgtttttaagaactcatgtcgggcagctccaggggatccagcatctctggcctctcatggcacttacagtcatatgcacatacctaaatgcacacacacagaactaaaaatgaaggaaatagccgggtgtggtggtgcacgcctttaatcccagcacttgggaggcagaggcaggcggatttctgagttcgaggccagcctggtctacaaagtgagttccaggacaaccaaggctatacagagaaaccctgtctcgggggggaaaaaaaaggtggaaataaaaattttaaacccttcatgtgggagtaaagactatttctatataggtactttatagctgaataacttcagttcttactacagacataaagtgctaggagtaaactttacaaactttacatgtctgatggtgacattctcaggtggtgtcttttttttttttttggttttttgagacagggtttctctgtgtagccctggctgacctggaactcactctgtagaccaggctggcctgaactcagaaattcacctgcctctgcctccccagtgctgggattaaaggcgtgcgccaccacacccagctctcaggtggtttttattgtatatttatagaccgtaagctcaaagagtatcagaacttagtttcatgtgataaggaaaagtgtaaggtagaaagagaaataacagtatatccttccctgcatcgtctgcataataaagacatacctagatcgaaaccaacaatcttaatccactactctttgactatctatttataaatatctgctttaaaatagaatatatcttttagggggctagagagatggctcagcagttaagagcattgactgctcttcctaaggtcttgagttcaaatcacagtaatcacattgtggctcacaaccatccgtaatgagatctgatggcctcttctgatgtgtctgaggacagctacagtgtacttaaatataataaataaatttaaataaatagaatacatcttttaaatcaattctatgtgattattttaaatgtctatgaatgtgtttgtgtttgtgggcaagtgctgggataaaagttaatgtcaagtttacctgtctgttccctgcctcatattgagtaattgcaatttgtagattgtgatttaaagaaaacaaattttattgttttttatttctgttctatacctagaaacggtggaaagaactttctaaagaagatttatctcctatttgtgatcattcacagaacagagtgatggttgagaagtacaatgggaagagaataggttcagaagatgaaaagttaacagggcttccttctaaggtgcaggatactgtggaggagagcagtgagaggtatgtgccatatatgtgctagcctaccgagatatgcgggtagtcactacactcagggagtctgcgacaggaccaccctgtgttcagacagttaatgctccttttacttgtgtcagagtgtttaggtggtatgtgatgacataaatatcttcagagagttttccgtcatcataagaaagccggtacagggcggggcagtggtggtgcatgcctttaatcccagttggtggcttactaccaacttaactccagcttttttgggatccaaggtccttatggtggtttgagtgtgcttagtccatgggaagtggcactattattggccttgaagtggctttttttttttttttaagtttatttattgtatgtatgtgagtacactgtagctgcacagatagttgttgggaattgaacaagggctcactctggtcagccctgctccctctggtcaactctgcacgcttgctcagtccctgcttgcacctctaatggcacatacctaaatggacacacatagaactaaaaatgttggaaataaaatgttaaaacccttcacgtgggagtaaagactatttacagtgtacataagtacactgtagctgacttcagacacgccagaaaaggtcatcagatctcattacaggtggttgtgagccaccatgttgttgctgggatttgaactcagggccttctgaagagcagtcagtgctcttcccgctgagccatctcgccagccctggagtggctttgttggaggaaatcaatcattgtggggatgggctttttgcggtcttgtgctcgagccccacccatggttgaagagattaggctccaggctgcctggagaagacagtcttctggtggcctttggttcaagatgtagagctctcagctcctccagcaccatgtctgcctgcccactgccatgcttcccatcatgaggagaatggactgaacctctgaaactgtgagccagccccagttacatgttttgtttttataagagttgccatgatcatggtgtctcctcacaacaatagaaaccctaagacaagcctccttaggcttttggttttttatttttatttagatttatttaatttacatgtatgagtttttggctgcatgtacaccacatgtgtgcctgatacacacagaggccagaagagggtgtcaggtcctttaaactgatcattcagacagtgaactatcaagtgaatactgggaattttccctggctcatttgcaagaacaagtgttcttaaccactgatccatttctccagcccaagaaatcaaaatttgaaaacatagtaatgataaatttaaaagctattgtttagagacaacaaaaactccaatactgctcatatacagaagttagtgtaattaggtgataaaaataaatagtataatacagaagatgagttgtataaaaatacctaattggccgggcagtggtggtgcatgcctttaatcccagcacatgggaggcagagacaggtggatatctgagtttgaggccagcctggtttacagagtgagttccaggacagccagggccacacagaaaaaccctgtctcaaaaaaacaaaacaaaacaaaaatgccggccagcaaatagaagcctaatgacctaagtttgttcactgagtcccactgtagaaggaagatacccaacttctcacagtgtcctctgacctctacaggtttatacctctctttctcctcctccctctccctccctccccacctctcatgcactcaagcagagtaattaaataaaaagagaaattcagagctgtatgcctatccccatgcacttaggaggcagaagcaggagaatctcaagttcaaggatagcttacatactgcgatcctgtctcaaagcaaatcattaatcctatctatatctagtcaaggctcatgcttggatctgaatgagacctgatgccttggtgttcttagtcagaacagatcccccacttttttctcctctgtttgaaagatgatcttttagcatgccttatagtttggatttctctaataattgttcttcttggttagaatcaagttaaatgttttgactagaaaaggtcttgtgatctagtagacattgaagagccagtcaagattttttttttaaatcaagctgcatgttcaaagctgtgacttaaaaaatgactgccaagccgggcatagtggcgcacgcctttaatcccagcacttgggaggcagaggcaggtggatttctgagtttgaggctagcctggtctacagagtgagttccaggacagctagggctacacagagaaaccctgtctggaaaaaccaaaaaaaaaaaaaaaaaaaaagccaagactgaagcactcacagtgagtgaaaagagatgggttttgtgagatttttttttttctagaggaagagagtaaatggctgacatgttgacattggccatttttcaatggatgtcagagaactttcattgaaacaaaattctatgttggacaggaaaatgggtgctagatgtacggatggtcaaatagaagactgggtaacctccaaacacagcattcatagaaattgtcaacagtatttgtcaaaggacattgaattttcatatgctgtcacgcaacaggaccagatgctgagaatctccagtctgtctccttcgtggtagagaggaaagcagagtgtgcagaaaacatgtctgtcttagcttcaggtcctgtaaaagcgttacttactgtaggcacagcagacgtgaccctgaactgtggagcacaccactggcctgtggagccgcttgtccttccctttgttactgcagtacactgaatgagatggaaagcatacaaatgagtgtccatggtttgatggtggcctgggccccactgtcagtgtgatgaaggcctgcagtgcagacactcacttgtttctgtctattcacagcattctacggaaacgtattcgagaggatagaaaggctacgacggctcagaaggtgcagcagatgaaacagaggctaaatgaaactgaacgaaaaagaaaaaggtggttatattggcaacctattctcactaagatggggtttgtgtcagtcattttggttggcgctttggttggctggacactgctttttcactaaatgttctataaattaatagttttacccagcacctttctgcactagtagctgaccgtggtgcattaatctcaagggtttgttagcaatgcctcatacccagaaacactgcgctagagtagacatcagccagataagggatattacagtcacaagcccagcatctcaggactcatcactgcaggttcctctgagacccagactgtcaatggctcacaataaagacaagcatgcttgttggatactgttacttcttacagctgcgttcacaccagtgtattgagaaatcctttatcccaaggattggcttttggaggccttctggattttaacctgcacttgatataagcaataaacattgtggtttttttctacattattaatggaaagaaaatatcctttaaacaatgtatgtaatatgtaatgtactgttgaaatgggcattacaactttatataaccattttagggtaaatatattttataagtacctatttaatcttacttttgtagttaaatgtactttttaaaggttcaatctgaaagtctgttatcatagaaaaataaattgtatgttgactcagttgtatactgaatacattttccctttcctaagcagacgtttgatagaggcagttgaaactataagcaagctaagactactacacattcttatttcctttctatttatgctttatcttattttaaaaagaaaaacaaaaattttctaaacatgtcattgaaggaaattgtttttttctgcgatagttaagaagtgacagttggtcaaaatatagttgaaaacaaacaaaaacttggtttctgcaggatgtggtagcacacacagtgctcaggaagctaaaacaagaggctcaatggtttgaagccagccaaaactacatagcaaggtcctatctttaaagataagagaaaaatagaggtggtggaggagagatcagacaacaccaagaataagaaatcgattcttagccatatttaatggacaaacctgtcatctcagcttttgggagatagaggcagaaggctcacaagttcaaggccagcttcaactacatagctagccccagagtttggggccagtcaggactgcaagaaacactgtctcagaaactgaagtggtttaaaaacattttgatttctgtaaagtaaagcccatgcatgactacactgttaattttttgtgaaaatgtaaatgtaattacccagacgggataaattatggttagtaagttaaaggaaccagtgttttatacttttgatttcagttcactagactgaaattttgaagtaaaaaaaaatttaatttctttacaagttcaataaatagtacaatggtgtacaaacttacattgtcccttacctttgtaatgagtatttttaaagcataaccactaattgggttttggtggtttcaaaccctgcttggtggaaaggttccaaaccattaggacagcattgctgcttcatctcttttatatatcacgtaaaagtgcgtggtaaatcttaattagtttaaatgagacagttaatttcttaatgcagtttgaaccccataggtgtagttagaaattgtgaatggccttgaaaagcatctcacaaagcgtatgatgtatgtgtgtgtcctgactcagcatagctgtcctaaggctttgaaatggagagcaggtaagaaggatgtttcctcttgtctgtttaatctctgtttaagcggaggccttagaattagatggctatgggttttgagctttctaacacttactggtttgtttttccaaaatgtagtatgttatcctactagaccttattaaaacttacagtccaagccaataaggtggcgtacacctttaatctcaacactaagaacaccaagacagacagatccctgtgagttcaaggctagtctggtccacataataagttcccaggcagccagaaatagacattgagatcctgtcttgaaagaaagcaaaccaactgaagatagcctgagcttaaacaacttcccacaagaaaaactgataaggctgagaccagtccttccttggacgatatgctttctagagatagcattgagcaccactctttctgcctcttggtgtgtattttatgtttgtgaggattcctttggcatacggaaccctcagtgctcctccccggagcccgtctttctcccctgaacacatctttaaggatgagttttaacaggagaacctttaagtcacactgtcatgttgcttactaaaggtacatggcctgtggtgacagtgtcactggcatcatcctgagcctgtatgagatgtgctgtgctgatgagagaagggtgctgggcagagaagggatactagcagtttctgatgggttcacggctttaaacacagtgtgcgtcagtctcggtagcagcttattttaactaatttaggaataatagtttgtcttggatcaaattctgttttttgtttgtttgtttgttttttgtttttggtgtttggtttttttttaatttggggaaaaaataggctttttaaaggggattattgtttactggaaagaatcctcacttcctgtttcctcccaccttgctgtaatgtcagtggtcacaagattcaccaggtactgtgttatctcagcctcctgatttctatccatgctcaaacctaaagtgtaaaagtacacattcctttttaaaaatacgcatatgcatcatttctacgttcagcagaatctacacatttgtcaagttttccacagttctcagttctttttatccattccgttatgtgtcacctcatgtatcaaacagtgaacataaaaagatatgaagacctgtattaattagtttttgtccaaacagctgtgctctgaagctgcgtcagaggaaaggtcctaatttctgagctcagcttccatgcactcggctcggccctttgtcttaaagtaaagctagtgctgtgagtttagaactgtggcccacgtttcaagttatgacacagaacagccctctctggttgtcatttcatttccttgtttgcttttagcaccagtcccagggtgctggctcccattttctgccaggcacagaaaggctacagctgactgctttaaaaatagctctgcgtagattctgcagagaagctggaacctaatggtagtaaaagtacttttttttggccattgtatacaatctacttaacaagtttacatttctgtcaagacattgcagactgaagatctacattgccttaatttgttacttactgatacaaatctttatttgtagttgttgttttggataggtttgtatattcttttttttttttttttttttttttgtatgtgtgttgagatagtaccttgccattgcccaagcctggccttaaactcagctcaaacgactttcctacctcagcctgttgagtaactaacaccacaggtacacactgtgcacacagctttcaagtataaatcttaaagagattattttaaaactgtagataagatttcaggcccttagtcaagcgtggtgcataccttctctgagtagggccatctctgggtcctggtgagtagtgtctatgtctgtgggaaggaagggctgctcggggccttcatctggctgagctcgattcatctgttcatagcatgggacaaaataccaacagaaatgtccattctatttacatgccaacacctaacaaagtctcttatttttaaaactcctttatatggctttgccatagaatcttgtatatacttttttttttttttcaaaatagaaatgattttttttctcattaaatttgtcatcttattacttgaaacgtgggcctttgttattggcagtggcttgctcccgaggaggcctgttctgtccaccctgtcccagaacgcactcatttgagtcagatgccacagttcttcctcacactggtctttggtttataccatgcagcaccatacctagagtcacagctgtctctaattgtcccctgaatatggaatgagagactcaggctgtgccctcattcactgctgctctgcactggagcctgtccccaatcagagaacttgcctcgtggccagcagtcttccttcctgggtcctgagcagcttcaagccttctgcattagtgctttctcttagccgtggctgttgggaagaagacccactgttctccacaggttgggttgttttttttttttttcctggctgtccttgtcccagcacagtgccatcagccattgtgagcagtgcttaaagtggaaagctacaccagcctaagaggctttgtgtaagctgacgtttaggatttaaagagcctggaccatctgagttctgactctgaagctctgcttggttgtaaagttccagttgattctgagcagtgaggtgtgaggccactgtcaccggtagggtctgcttggatgccgcctgctttacttggatctgttttgttggggactgctgcaaggagaattgcatgggaattttcttctttttctttacagagacttataagcatcgagttattctttgtagtcactcattaggcatagttttttttttttaagacccatgatgctgttgctattccccccccccttttttttttggttttttgagacagggtttctctgtataactctggctgtcctggaactcactttgtagacctcaaactcagaaatccccctgcctttgcctcctgagtgctgggattaaaggcatgcgccaccacggcccggctgctgttgatattttaaatgactattttaaaaagtcgttcagtgtggaaagttgaggagaggaagcctaggtaagttcctttaaagcatgcttggctcacctcggttagtcctgatcaatctcagtcggatgctaatgtaaatgtcgtgtggcaaaacaacttttaatgcagtctgactttccctctaacacgggcaaggaagaagacaccagcatttgcctctgcagcacagaggcagcccccaggatacccacgtagctcattgcttggtttgctcgcccattttacttttgccttattaaaaataaaatggtgaagatccattcaagtgaatataatagaattatctcaaaagccatttatcttaatagtcttacaaataaagtcatttcttagaagctattccattgatttcctcttattttgctacccctaaacactatttgaaaagaagtaatgagtttcaaaaaccacagcgtgtctgttaaatggcaaatttattattcttggtaaatgtgtatttaacaaacactaggaaaggatatctcgtgtgtatgtgagagagaaagagagagtgcttcacaacactttaaataatgccagccatattttcagataagaaacccagtggaggtgtgactcacgccttattttccagcctgtgcagatagagctgagatgcagactccaggctgtggtttcagtccctccaaggctcaggctcattgtgctactccactgtgtatttacttaaaccagatgtttaagcggggaaatagtagacaccccactagtggaggggtggaatcccttttacaatgcttcactgactatggcggaccagaacgtttctgtgccaaagccccacttcattcctttctgttctgttccacattctgccagagtcagaaccagccgtttggtcccaggtcctgcgacccattgctatctaaagagtatggttccctaatgagaacactgcagagaatcactgttgggaaatcaaacaagactttgtagaccaccacaggggcttggtagatctgcctgcctatggagaaagaagccagtagacaggaagaagcttcattctcatggttggggaggagcctaagtggtggagatctagtgtattgcctgtttatacagtgataaagtcaagtattttcatgggtagagagcgagggtggaggaagggaggggctgcgatcggtgcaaaaatggaaatacctttaatctcccaaaagctttgaccactggcaaacaattgaaatatcagcaaagactactgctcttaatggtcacaccctcttgtttaaatggcgtccccctcccaagcattaaattgcgctgaactatcacagttttacttagttctagtagttataatcattagcattctccttcaggagaaaatctaaatgctggaaatctaattcagagataacaagccaactttatgtgcaaactttatatttaaactgtttctagcagtgttacagtgattgtccaaactggattagacttttgcgttgaaatcaaagtatgggtaagtctagcacatgtaataaaaccttgctgtttcttgtggctacatttttttttttaacttgtctgtctcttagcctaccatgtagaggtcatttcttgagttaagatgggatggcctaaaagattcagtgtgtagttactgaagaagtaagtcccggcgcctcagagcagtctgtctcacagccccgcttccatttggaaacctgccattctggaaggaagcacttggtgttcttggaatgttcatgttggaatgatttttgttgttgttgttgttgttgactttttagttcagtcttagttcttttgtgtttgtatctatctatgtacatctgtgtgtgtggtggccatggattgaatagatgacttcttattttatgttttaggccaagattgacagacacctaaatgttcatgacttgagactattctgcagctataaaatttgaacctttgatgtgcaaagcaagacctgaagcccactccggaaactaaagtgaggcttgctaaccctgtagattgcctcacaagttgtctgtttacaaagtaagctttccatccaggggatgaagaacgccaccagcagaagacttgcaaaccctttaatttgatgtattgttttttaacatgtgtatgaaatgtagaaagatgtaaaggaaataaattaggagcgactactttgtattgtactgccattcctaatgtatttttatactttttggcagcattaaatatttttattaaatagactatgttggtt

SEQ ID NO: 5 - DNA, 9860 bp, Homo sapiens
agtgcctcaccaccacctgcccgcgcgccgccccatataaaggcgccgccgtccttacccccaggactcggccccatggagacgccgccggccgccgctggcgcatggcggggtgaggcgcggcggggagggtgcgggcctcggcggggaagcggcagggagcgctccggcggggtccgagccgagccgaggggaggggacgggaggggacgggaggggtggagaggggaggggacggaagggtcggggtcctgttccccggcccgccgggcctcaggacccctccaactttgcccaagttgggagagccggggaagagcaccaggttcctgatcgggatcgcgggccgagcaagcgcgggtctcgggccgggacagcctcggcgtcaccagctcccggcagccaaccaaagttttccagcaacttttctccccacgggtcaccccagaaacttgccctccccggctccgggagtccggccatgggccttgcgctgcctgggcctgagctctgagtgccggacgggtgggcgaaagtggtggcctcagtggggaagccttgggccccgcaacgcacttccagccccaggattccatctgagagccccgtccctgccttctgggtcccctgggttggcgtgggggttcgaggctttacagctggggtagttccagtcttagttcagactaagttccgatcttcgagccaccagctaacagctggatgaccttgagcacgtttttaatgtctgtgcctcagtttctccctttatagaatgggaatgggaatgcctagctgggagagcttttgagaggacaacctgaactaataacacgatgcagtgtgtagtgccaccaatccctcatcctgctggatgtggttttgggagggaggttaggagagagcgctattcaccgtccctaaccctgttggttgttcagtaggagctgtggcgcggggccttccaggagtctgagctatgagtggcccctgtggagagaagcctgtcctggaagccagccccaccatgagtctgtgggaatttgaggacagccacagccgtcagggcaccccaaggccgggtcaagagctggccgctgaggaggcctcggccctggaactgcagatgaaggtggacttcttccggaagctgggctattcatccacggagatccacagcgtcctgcagaagctgggcgtccaggcagacaccaacacggtgctgggtgagctggtgaaacacgggacagccaccgagcgggagcgccagacctcaccggacccctgccctcagctccctctagtcccgcggggtggtggcacccctaaggctcccaacctggagcctccactcccagaagaggaaaaggagggcagcgacctgagaccagtggtcatcgatgggagcaacgtggccatgaggtaagtgtcacttctgtggccaggacacatgaggttcgcatctctcctgtggccaggacacatggaaggatgactgtctctgcagctctggtgggctggaagaagtgacttccttcttagggactggtctagagggagggaaagccttttatgaggctagggtcgcgctactggtaagtgacagaggcagggttccagcccaggtccctctgtccgcagagcttaccttatgctgtgggtccctccctgaggccagcactgtgtctccactcctctcctgtaatgtgaggcagggctgtaaaggggaccagcccgtgggcagctgctcactcacccctcggaacctgatctcaggtgggtgttgtgaggagggagtgtgcggatcccggagaggagcaagcgttcaggaaccatagtagtggtagtaggcagtggtagtagcagttgttgttgttatttcaggggctgggcttctgaggccttcttgtctcagacctgggctcccacgaaaacaggtccagtgactgtgtccaagagtgacctcaaggctgggtccagctttacatgggttgtgggcaggtggcctgatgctctggcctcaggcgagctgcaacttggatccctactgactcagctgaagcagcctgggctggaccagtctctggaggttccccggggccagagccaggactcagcccccagtgactcccacccccatcccccagcacaggaatggggtggggaggtaggggcagagagggaagccagggctgctgctgaccttgggaaacccagacttctcccgtcaatccaggctccaccctctggccccacttttttcccagttccctccaaggcaggctgatgagtcagtgctgggtggatggctcacagggaaaagttcctgttggcatggacggggagaccccagacacagggttgagaagggatgattttctggctgccctgagggagctcctaggtgggctgcccaaggctggcatgacatcagcctctgccctccctaatttgtggcccctgtgggacaagttcactgtccagctggccctggcccagctcagcaggcatgcagctgagtgctcttccctccttctgtcaccttcaggccagtcttcctctctctgacttgggctgagcctggatgggaggctgagaaaatccagtttccatgccaagaggcagcaggtcacagcccatgcttcgagattagaaggggtccctctcagtgtccagcctcatgtagctgggctaggagctaggttggatctgtgtgactccttcctctggaggtatgggccaggagcggctgagccctgggagcagccatatgcagtatgtgtttgtatccagaaggaggagggacatgggaggaggggctgtgatgaggggtgctcagaggagcctgctcctgagaagcagagccacgcacccacctcgggggtttctgagctggggtagtggcaggaggggaattccagcctcaaacttcctgtctcagctgctactcggttcctgcccggccaccccccctccccaggggcaggcgggctagcccccccatcatatgcaaatcatggggaaattcacctctgtttccttctaagggaatttttttccactcgccaggcccagcccaggcatatcttttcacctggggaggctggcccagccctgccttctgtcctggggcaggagcagcctagctggagtcttctacacacacatcctatcagtgtctgcttagcccggctgggggaccctgaccttacaggcaaagagaactggaatgggggcagggatgtctggttttcctgtgccagcagcgcttcctccagtgcagtgaaagagactaaagctagctgtaggggggcactccaggcctcatgtgctctaccaggaggagggctctgatagcgcccactgatcagtttttccatctgctgagggaatattcaggtgctagggctgctgagaaccgacttgtcccagccaagattttcagtgcccacaggcagtgcactgccctgagagccctggcatcccattagttcccagtgctccaagatactagcctaggatcatgtgcccggagggaggcaggtgggcggatacatgcgcacactgcatacctgagacaaggagccaggcctgggatgacccagctgccatggttttgagaggcaggccagaaggcccaaggaaggggggtgatgtgatgggggaagcactgggcattgtgaagacacagaccagggacctgacctattgtggcaggtcagggaaggcttctcagaggcagtgacatctcacaagggttctgaaggaagagcaggagtttgccagcagcattgtttctcccgttcgccacctgtctctcataacacactttgttcaaactcaattttgggagctttgttctcccaaataaattctggatcttctgttagagacaggaaggcaaccgagtggcccagacctgggttcgagttctgactgtctcttaccactagccaggtgaccttcctttccttcacggtagcaagccctataagaatgaagccatatatctggccaccagcgggagctcagtgcctgcgaatccctgctcattccctgcgatcagggtctgtgcctgccttcgtacctgcctgagcattgacgtacagggtagtgataagcataggccctgggcttgcgtctctcttccaccgttaactgctgtgtgaccctggtgactaagctgccttctctggaccacagttttcatctgaaaaacagggaaggagttgatgatggtatagtgccctcctcacaagcttgctgatgattcagtgttagacacttataacagggcctggttcacagctctcagcaaatgggaacttttattataagcaggctggcagatgtggcagagggaccgggaaggatgagtgctgccctgggctggactttgtctcccctacaatttagagaccttcagaccctggtgccccagtcttgcccccaaatagcctccatggcccccagctgccccacctccctccctagcttctcttagggctccagctatcaccccttacctcccccactcccattaaagacacccacaggatgtggttggccctggacttgcctcttttgcgtaacatttattctgttttatttgccaaatacgagagtctaagctgttcactgagggggcagtgagacgtggggctgctggtcctaggagctcttccatgacacctagtgttacctgggagccccaagccccagtcccccatccctcaggaaatccagttggaacccctactttgcagggccatctttggcctgaagccaccaggaaagctgtcccactgactgacccctcttaaggaagctgcagactgctgggcccattttcagatagaggaacggagagctgcggcagcccaggagccctgccaggcttccttctgggtgcagccacctgtgggtggggcgcggcctcgtctgagaccaaggcagggcccatgccttactcagctgtccttgctaagagtcccctagcatcttcctgatggtctttctgccttggggtgaagaggcatttgggggaattgccatcttgggaggaaaagcagtatcctttcactttcagactgaaaggctcctggggaacttgcttcactccggcgctttctgtcccatgctgaaggctggagtcgccagccccttcccctttgcctttctcaggccccagtccctgaggtgtgtgtgaggactgaactttaatccggaacaatctggtttctcctcggtcagcccagccggtgcttcccccgcccccacccacgctgcaagaggcgagggaggggtggtgactcagtgtgcatgtgtacatctgtccctgtggtcccggcagctcgccgggtggggcaggaaccagaagtctcgcggcacctttcccccacccccaggtgtgttgcaagtggcctggccctcccccaccgtggggagcagtgctgccagcttcctgggcgcttcctcactttcaggagatggagcctcagggaaagtcccagcggggcctggccatcctggagctgtgggaactggcactgggaatggaggccttggccttgggccccacctgcagagggccagggcctgagccctggggaaaggggaaggggctggtgactccaaaggggaagggactgctcactaccaccaccaaagccagggcaggggtggggtgtgaccacctccctcctcctgctcaggcctagggggtggcaggctggccatcagtgtgggctaaccctgtcctctccctcccagccatgggaacaaggaggtcttctcctgccggggcatcctgctggcagtgaactggtttctggagcggggccacacagacatcacagtgtttgtgccatcctggaggaaggagcagcctcggcccgacgtgcccatcacaggtgagtggtgcctctggaggtgggatggtcttactgccccagcagccctggttctccccaagagagaccctctgggagtgacctacaacttctagaactcaagcagggaccagcatttcttttctcagttttttctgtccttagcaacctgctctgaatggtggtcattggaggtcaccttgtccagtcttctgcctcagatctggagcccctccctcatcctactggtgggcaggtcgctctttcaacatccccagtggcagaagcgcagtatcacatagtggttaagcctgtgggctctgagtcgagacagccagagttggaatcctggctctgtcccctcttggcgccctggcctggacagggacccctcttagccctgctctgagccacatgctcctcatctgaaacatggggtcggtgtcagcagggggtgttgacagcattgccttcctcgtgaggtcatataagttaacacacggtaagtgctgagaagagtacctggcacatggtagatgctcagtgtatgttagctgttaccactgttcttgcaagagcccccagcctttggaggtaaaaactgaatcagtttctctagaagtcttgagatctgggggcagcctgtctgggactgtaggctccaggaagaggggccctttccacttgcacacttctgtgtccctgtggtcccagcagctccccaggtggggcatggtgagtggcctgaccttttcccaccatgggatttagcgaccttgtcctggcaatgcaagggacagagccaagatacttctcccaccccagagcaagctgcggctcattcacggacccctcagaacaggctggatgaaagccaaagccaagaccacatctggcttgaacaggcctgatgtccagaaggagaaaaggaacaaggccagctctgtgcttggagcctctgccatgcaggccctgccgcctgtgttcagatgttcttggtcttcaggcagcaaactgtgccacgccaagggaggggctggggcatggaagaggcctcagcagagttagttcttgccccggtgaccttggcgttaaccactcctgtgtgtggccatcagcaggttagggagccctgtaggcctggctctaggtcccgctgggccctgacctgtgtgcacccgtcacctcccagaccagcacatcctgcgggaactggagaagaagaagatcctggtgttcacaccatcacgacgcgtgggtggcaagcgggtggtgtgctatgacgacagattcattgtgaagctggcctacgagtctgacgggatcgtggtttccaacgacacataccgtgacctccaaggcgagcggcaggagtggaagcgcttcatcgaggagcggctgctcatgtactccttcgtcaatgacaagtatgttccctcccagaggccctgacagacttggggtccacaggggaagccagaggtgcccttggcaagggtggagctgggggctgggctctgcggggccctgtggccatgggaggttgcgggtcttggctccaggcagctttgagagtgagacggatagctcaccacataggagaaatcagaccgggaccaggcaggctgtggggtggagagagtggctaatttgggagatagagccgtagcacttatgaggggatgtatgtggttgatggttccaggtggcctctctacgaaccaacatggcatctctcgagcagaggccatgggccagtgggtgcgggctgccatcccccgacgacctcagagagggagttcccctaaaggtgcccatgggctgtggccctctagaccggggatccctttctcctcccttggtatgatcccacccatagagcagttttgcggggtcctggacaggccccagttttaggtgtcactctcctattcttcccagcaaggcttgccatcggccccttctcagcaattagaagtccctgcatggctcccacctccagagagttctttgcaccctctgcaggtttatgccccctgatgacccactgggccggcacgggcccagcctggacaacttcctgcgtaagaagccactcactttggagcacaggaagcagccgtgtccctatggtatggaacccagcctgccctccccggccctcctcactcctgcccttcctctcacctgtctgcctgtgccctgttttcctcttggggacctccaccattggaccacccaaccccgtttcctgtgccaccccttccctgctctcatccctggttctgaagtgcccctgcttagagtccctcttgattcctcttccaggaaggaaatgcacctatgggatcaagtgccgattcttccacccagagcggccaagctgcccccagcgctctgtggcagatgagctccgtgccaatgctctcctctcaccccccagagccccaagcaaggacaaaaatggccggcggccttcaccttcatcccagtccagctctctgctaacagagagtgagcagtgcagcctggatgggaagaagctgggggcccaggcatccccagggtcccgccaagagggtctaacacagacctatgccccatcaggcaggagcctcgcacctagcgggggcagtggcagcagctttgggcccacagactggctcccacagacgctggactcactcccgtacgtctcccaggattgcctggactcgggcattggctccctggagagccagatgtcggaactttggggggttcgaggaggaggccctggtgagccgggcccaccccgagccccttacacgggctacagtccctatggatctgagctcccagccaccgcagccttctctgcctttggccgggccatgggtgctggccacttcagtgtccctgccgactacccacccgcgccccctgcctttccacctcgagagtactggtctgaaccatacccactgcccccacccacatcagtccttcaggagcccccagtgcagagcccaggggctggcaggagcccgtggggcagggcaggcagcctggccaaggagcaggccagcgtgtatactaagctgtgtggtgtgtttcccccgcacctggtggaggctgtgatggggcgcttcccacagctcctggacccccagcagctggctgccgagatcctctcctacaagtcccagcaccccagtgagtaagctgcctgtggctggcaagggcagcacccccagcctccaagggccgtcaggctgggctttgggccattgagcagcccattcccagccctgaggcccaccccagaggctggacagagggaggattcaagtcgggaaggaaacccacaaaccaaagatactgtaggattggttctggcccatgcagcacctctagctgtctgcctcagtgggtcagaagcgatcaccctgttgatacacattgtatctctgtagtttaaggagacgctgccggtaacggcgtcggtccgtggctgaggcccaaaccgtcttttctctcagagggtggggagggaggtgggggcagcagaggcctgggctgggtgccctgtgcacgccaccccacttccgccctacccctgggacgttggccttggctggctagttgggcaccgtgtgcctgccctccaagggcctcctctacgccaatgaggcctcatctgtgctctcgctgggcacgtggcttcatgtcagtaagcaagatgcttcttaataacccaccttctgccccactctattccttatcctgctgcccctgtaggggtcaagggccctccgtctacaccctcttcttctcctccatcctttattcagagtcatctcgcccttccccatgggtgggggaacctgtgtttgtttgtgtgcacatgtaaattttaaatattttaagcagaaagtccttacctcctgtaacacatcaataaagtacaatcattgtgagccctttcaa

SEQ ID NO: 6 - DNA, 9468 bp, Mus musculus
ttccgcgtcattgcccttaaagcacctgcccgcctgtcgcggctacgaaggtgccgtcagagcccgagactcggctccatggacaccttacagacgacgtccggcgctcagcggggtgagtgctaccgggtggaacgggtgctgcgctgcgttgggtctgactccgggagggtcgcgcgcgggcagtgtctccatcgctgggaccccgctgagttcaccctggtgcgtggaacggggtgtcttggggcacccggcgttctccgggctctagccaggacctcctcgcgtcaccgggcccggtagccaaccagagtcgcccagcaacttttctctccgtgggtcaccccggaaacttgtccttcccagaatagaactctgtccctgagccgaagtatgagactcggagacgaaggcggtggccacaatggggaagcccctgggtcccctgcgcacttccagccccagtttccttctgagagccccgcccctgcctcttgggtcccttgggttggcatggaacagaacggggtttgggggtggagtcagaccaagttcaaatgtttgtatcacaaactttgagttgatgatcttgagtaaacgcttactgcctgtgcctcggtctccctcttgtaaaaataactaatgctgagagctctttgagagcacagcgtgggctgacacgtgagaatggctttgaatagcgtcttctcagttcgtgttgccccattctgtggaagagagtctgaaagagacctatattgggcattgcttgcccttaaccctgtggtctggtcaataggagctgtgatggacacattccaagaatgtgaaatatgagtgacccttgtggaacgaagcctgtccaagaatccaaccccaccatgagtctgtggagtcttgaggacagacacagcagccagggtcgacctcagccagaccaggatcctgtggctaaagaggcccctacttccgagctgcagatgaaggtggactttttccgtaaactggggtactcgtcctctgagatccacagtgtcctgcagaagctgggagtccaagcagacaccaacacggtgctaggggaattggtgaagcatggctcagctactgaacgagaatgccaggccctgacggcccccagcccccagccccctctggtgccccggggtggaagcacccccaagccttccactctagaaccctcactcccagaggaggacagagagggcagcgacctgagacctgtggtcatcgacggaagcaatgtggccatgaggtatgtgtggagacctgtggaatagtgtctgtagctcttcctttgggaagggggcttggcttttctcttggactggtgaaggaacacaaaagctgtctgtgagatcccaccatgtgccagaaggaaccccttaagccttaaagacttcctcagggctgtttctccaatgctataagaaggaaaacagctcaaatccttgccaagagtcacacttcttgataaatgagaagcaaagattcaaacccagccttctttgcctggagtgtaccttgtgccatggtctatccttgcctacggcatgaggcaggacagtataagggattaacccgtgggccagtcacttagccagttgggctttttcttctcctgtcaaactttccactcaggtggcccctgtggggagaaaattcatagaacgtggagagttacaagtactcagtggagccgggcgtggtggcacacacctttaatcccagcacttgggaggcagaacaggcagatttctgagttcaaggccagcctggtctacagagtgagttccaggatagccaggttctatacagagaaaccctgtctcaaaaaagaagaagtactcagtggacagatgttattccatgacttgagtcttctgggatctccttgtccccgactcgagctcccactgaagcaaggctcattagttattcagagcttcctagccctaaccagctgtgaccttttggtcagatctggcatcttcagatgcgtgtgtacgggtagcctgatgctctgggctcaggtgtgctgtaatgagaatctatactccctgaagccgctcaggctggcctgacctctgggggttcccagatctcctgccgcctttgcatatctctcaaggaatggggtggggtggaggcagaatgggagccaggctgcctctgaccttaaggagccctgatttctcccttctatccaggccgcaccctccagctctgctttctcccagctccctgcacagcgggctggtgagtcaggactgggtggataaagtacaaggaaaagatcctgttggcagggaccaggggagaccccagcaaaagaacaggaagaggagaagtctcctttctagatcccctgagggctctcccaagaggactgcccaacttgttatgatgtcagcttcttcgccacctggctcctggtcctacctactcccagcccagctgggtcaagtgagctgtccagctggtcctggccctacttagctggttcatggaggcagcccttctctaccacctttgggtctgttgtcacatctttaaaatgggccgatcctgggctggaaggctgagaaatgctggcttctctgccagagggcagaagggtcaactggttaccttccgagtctcgagttctctctgaggtcctgaattaggaggggggtctgacttcccctgagagtcctaggctgggtgttaggagtcttgtgggcagccatgtgctctgggtatttgtttctgggcaggaggaggaggggcctgggtgggaggaggggcagtagtggaggggttcaagagagctgataccaaagagacagacagccactgtctgccctcttgcctgcctgcctatctgctgggggtttctgagctagggtggccacggaaggggaattccagcctcacacttcctgtctcagcagctgcttggttcctaccctgctgctacacacacacacacacacacacacacacacagacacacacaagggcaggccggctaacccccaccatatgcaaatcgtggggaaattcacctctgtttccttctaagggaattttcctccacaggagttaggcccagcccaggttgttctctccacctggggaggctagccctgccttgtccttgggcaggaatgggagctttccagagtcacggccctgtcagggtggggggccctgaactgtggaccagcaggactctgtgggtgggaggaagttggttttcctaggccaaccaggcttcctgcattgcagtgagctgaatgagctgtccaggcggtctgggcctcaggcctcaagggctctccctgccaagaatagggctctgactacctgctgagggaactgtcccagtgccagcactgctgagggcagacgtgtccccaacctgggttttaaatgcccacaggcggtatacagcctaagcaccctggcgtcttgagatcctccaacttgtctttgctggtccagggagggctcgtgagtccacatgtggacactgcacgctcaggacagcgagccatggggcagatgcttacctcacacctgagcgaggcagtgtgatgggacagcagtgggcattgtgaagccccagactgggccctgccctggcaggtgcggaggtggggtggggtggagtggggaggggttctcggaggttttgacatatcacttggcttccagaaagaagagaagaattggcagcaaatggctcatcatttctctgtctgtggggcggggaggcatctccctctccatatgcagaacacacaccatcattgataattgagttcagaaactgctcttctcccacatgaactttgggtcttctgtaagggacagccagcgctccaaccagtagccccactccctggttcagttttcaccacttggcagtagccagggaacttgtccaagtgacggaagtcttcctttctagacagagtgatggtcaaggtggactccgtgcctttcccacctatcagggctgttggtacctaagcaacaacagggtagttctgatcactggctactgtgtgaccctagtgactactaagttaccctctctggaccacaggagcggaggcagtgtacttctggttttgcttgctgatgattccgtgtagagcgcggaatggccaggtttgcagctccctgtgaatgttaaccgacttatgagcaagccgcctgggaccaggagggcgcgagggctcccttggggtgggctttcttcctctccaactcagagacctctagctagaccttggagccttgccctgagatagtgtccattcccactctgttctcttggggctcaagctatcgctcccccaaagccacccacaggatgtggtctgccatggacttgcctcttttgcgtaacatgtattctgttttatttgccaaatatgagtctgagtcgctcactctccccagagtaacaagaggcagggctttctggggagggagccccaagctccagtcctccttcagcactcccagaaaatccaccttgccagcgcctctggcctcaagccttagggagctctgtgtccctggggtgaaagagcttgtctgcaaaagctgtccaccaagcttgtgggcagagacacagaccagggcaagcagctaggctgcttccgaggaaagccgtgtttagatagaacaaggccagggcctgatgccccagccctcctgtgagcagagttccccagtaatttcctgcccatcatctgccaggggtcacgccctccctggggcggggggtaggggagggcagggaggggcagggcagtctttgcagggaacaggcctcttaagaggaaaagaggtggcctttcactttcacacggaaaagctcctggtgctgttatttcctgaccccttgtggaaggacgctccccgtgcccctgagacctcatgcagactgaactttaatcctcaacagtctggtttctcctgcttaacatggccggtgcctccctcccccgcctcccttgctggtgcctccttgctgtgtagtgttgagggaaagaggtgactcagcctgcatgtgcacatccacgtccccgtggtccctgcagcttgggtggggcaggatccccaagtctcccatcacttttccccacccccaggtatgttgcaaatggcccgaccctccccctctacgtggggagccagtgtggctagattcctgggtggatccacgcttttaggagatggaatcttagggaaagtcccttccaggggctggccatcaggcactgtgggaaccggcccagggacaagaccttaggccctactggcagagggccatgggctgagtcctacagttgcccagcaaggccaagcagggctagattgtggctcccttcttacttttgctctgaccggactgactacatacagactggctactctgtgagctaacctttccctcctctgccagccatgggaacaaggaagtcttctcttgccggggcattctgctggctgtgaactggtttctggagcgaggccacacagatattaccgtgtttgtgccatcttggaggaaggaacagcctcgaccagatgtgcctatcacaggtatgtatgccctctggaagtaggatagcctcactctactagggaccctggtgcttccccaaagggtccttaaatagggtcagcaccttctaaactgtaatgaggaccagcctgtctttttcaattcttgttgctttcagcagcccagttcaggcaggaaatggctggaagtcaccttgtgtcgctttgggatgccttcctgatcctattggagtggggtgtcccttcttcaacatccccggtggcagagggacagtgtagcttcatatttgaaattgtgggtgctgggccaagaagacagggtaaagggcttggccctaagttactcaggtaagggcttcaagtagacattagctgtgggctcttccatctgtgaaatgggacagggtagaggtggcatcctccaaacactgctgaaggagcagttgagaatggtacagaagtgcttaactcagtgcagtgtgaaagctcggcatagtgtgaatgcccagctgcgaccattgctctcatgaaagcccccaccttgaggaggagggagtgacaagaggcagctttttaagaagtctgcataggctggagagatggctcagtggttaagaacactgactgcccttccagaggtcctgagttcaaatcccaggaactacacggtggctgacaaccatctgtaatgggatctgatgccctcttctggtgtgtctgagctacagagtactctaaataaattattaagaaaaaaaaataaggttggcttagataaaaaccatagactacattttaaaaaaaaaataaagaagtctgcaaatcagggccatgctaggggcttctaggccttttctgaacagagctgggagtgttgttttgagtgtgtagaggacagggccaagacacttcttcctggacccctgtggtacaggcaaggcacacaggtcggaggggaagtaggaagagccactcttggctccgcactcttgctgaatgtgatggccctgcatagagatgcacttggttttcacacagctggtttccgtcctcttggaactggtgtgaacagcctctcatcccggccactgtgagccatgggaccctgtgggtccatcttagggtctccaatgggccctgacctgcagctctgctcatcccccagaccagcacatccttcgggaactagagaaaaagaagatcttggtgttcacgccatccaggcgggtcggcggcaagcgcgtggtgtgctatgatgaccgcttcattgtgaagctggccttcgaatccgacggagtggtggtctccaatgacacgtaccgagacctccaaggcgagaggcaggagtggaaacgcttcatcgaggagcggctgctcatgtactccttcgtcaatgacaagtacgttactgctggggactggctctgctgggcccacaggctgggctgcagctttcggggtgacatgagttgcagggagaaggctagggacagtggaactttttgatagggagcctgggagttgaagctggcccgagacagaaccaattcgttcctaggtggctctctcaagaaggtctatggccacacacatcccaagatacacttagccttcctgatagcctcatagttcccagcctagggagtgccccgaaggcgaccctggcctataccctctggactgagggatcccctcctcctctggggtgacccaactgcaaactcagaagactttaggggcatcctgcagacaagcatcttgggagctggctatctaaccctttccttggttcctcttcacgacttctgtttcctgagcgttctgcttcacctaccacaggttcatgccccctgacgaccctttaggacggcatgggcctagcctggacaacttccttcgtaagaaaccactgccttctgagcacaggaagcagccatgcccctatggtgagacccagctctgtcctcaatagtcttacttaccctacctttcctcttgcctgtcccatcccacttaggcccgcccgtggcttccttgtggggaccccctgttctagaccacctgaatcccaagtctgtgcctcgtcctcgctctgaccccatttagacaccctctctgttcttgcagggaagaaatgtacgtatggaatcaagtgccgatttttccaccctgagcggccaagccgtccccagcgctctgtggccgatgagctccgtgccaacgctctcctctcacctcccaggactccagtcaaggacaaaagtagccagaggccttcccctgcctctcagtccagctctgtgtccctagaggctgaaccaggcagcctggatgggaaaaagctgggtgccaggtcatctccgggtccccaccgagaaggctcaccgcagacctgtgctccagctggcaggagcctccctgttagtgggggcagctttgggcccacagagtggcttgcacacacccaggactcactcccatacacctcccaggagtgccttgattcaggcattggttccctggagagccagatgtcagaattatggggcgtgcgaggaggcagccctggggagtcgggccccactcggggcccctatgcaggttatcacagctatggatccaaggtcccagcagcaccttccttttctccttttagaccagccatgggtgctggccacttcagtgtccccaccgactatgtgcccccgccacccacctacccatccagagagtactggtctgagccgtacccattacccccacccactcctgtccttcaggagccccagagacccagccccggggctggtgggggcccctggggcagggtgggtgacctggccaaagaaagggctggtgtatataccaagctgtgtggtgtcttccccccacacctggtagaagctgtaatgagacgcttcccacagctgctggatccgcagcagctggccgcagagatcctgtcttacaagtcccagcacctcagtgagtaagccagaaggtggcgcaaggggctgtcgggcatcacagatagcggtccccagcccctgcctggcctaccctggaagctggacagaaggacaagtgaagcaggcaagggaatcctcaaaccaaagataccataggattggttctggccccgcggcaccccaacccgtcccgcacaggtcagaagtgatcaccctgttgatacacattgtatctctgtcatttaaggagacgctgccggtcaggccgtccatccgtggctgatgcccaaaccctcttttttttttctcagagggccgggtgggaggcatgggggagcagaggcctgagctggaccccaccttccaccctgtccctgggacgccggcaccaccggctagttaggcaccatgtgcctgctctctgaggccccctcaagccaatgcggcctcatccctgttcacagggcatgaggcttcatgttagtaagcaagatgcttctttaagcccctcccctgcccgctctgtccacctacacaccccccccccaaccagggctccaaggccctctgtttccacacctcccatgggtgggaggacacatgtatgctgtgtacagaggcgagatttaaatattttaaatgaaaaaggttgacaaaataaaggctattgccaggcaggctggagagatggctcagtggttaagagcaccgactgctcttctgaaggtcctgagttcaaatgtcagcaaccacatggtggctcacaaacatctgtgatgagatctggtgccctcttctggggtgtctgaagacagctacagtgtacttacatacaataataaatcttttaaaaaagagagaaatttaaaagaaaaaaaaagctattgcc

SEQ ID NO: 7 - DNA, 214092 bp, Homo sapiens
gctgtcctgggtagaagggtttggcagccctagggagatgaatttctccagcgttggacccgcccagagcggagaagcaacacccttccagccactactctgttgctatgaaacaaaagactaggaaggtaagcgaagcaggaagtcccgcctttcagccccagatggctttggctcccggtcccgacgctcacgcccacctgccaccccttattggttagctccttcgtgccttgcatcccttcgtccatttcctttcccgtttccactttcgttcccgggagagtccaggcccctcatttctctccgagtccaattcctttctgacgtgctgcgagcgggccttcctctggggccattgtgtactgtggaggacgtggacggggcggcagcgcgaggaggacgggcgcctcccgtccattggctgcacccgctgtcgggcagtgcgcggttgcgcggcattggctcagcggcgcccggccccgcccccgccccgccccgccccgagcctgggtcctgtgtgtgccacaggggtggggtgtccagcgagcggtctcctcctcctgctagtgctgctgcggcgtcccgcggcctccccgagtcgggcgggaggggagagcgggtgtggatttgtcttgacggtaattgttgcgtttccacgtctcggaggcctgcgcgctgggttgctccttcttcgggagcgagctgttctcagcgatcccactcccagccggggctccccacacacactgggctgcgtgcgtgtggagtgggacccgcgcacacgcgtgtctctggacagctacggcgccgaaaggcaagaagggaaggggtcgccggggaggctccacacttcttgccggcccgggggcccggggtagccaggcgcgggccaaggaggaagaggggacagccctggctctcagctgcctttgccgccgccgtccagtttgaagtggggcatttaaagaccagaacccgcaggccggggaggagggagagggcgtccaggcagacggcggtgaggactgcagcaggcggccgggaggcgcgtccacccaggcgccgagcccacagtgtccctcccgcgccctagacggacggtgctgcgggcacgggagggacactttgtcccctcccagtccaccttcctcctgcagctcagacccgaggggccgggaaggggcctgagcagggaagggacacaggcgtcctgaaacaaagctttgggttgagggcagaggcgaggagccagagaagtgaactcctcctttccgtggccgctcttgtcatttttctcttttctcttttcaaatgggctatttgtgtgttaatttcatttggttcttgggaataacgactcaccgcgttgatttaaagaaaggtgttcgtgtgtccgtacttggtggttttagtgtgggacatgccctgcgcttttgttgacaacagagctgtcccttacgtttgtgtaggataatctttatgtttatgtaacttggagaaatctaacagagtgaaagtgaagtttctgcgtaaggctcccaaaatgtatgataggaccttcagttgttctggtattttgaattggaattaaggcaggaggggaagaacattctgtttttatctaggtgggggaaacctgtttaagttttgtttgttcttttttttttttttatgagttgagtattagttcagccttagctacttgaaacgtgagcaggatgcatctttaactcttagtattgtaaaagcaaatctaggatcactgctcttaaaactactgtgtgtaaagattgagagtgtaaattcacaagcttattgataaagatgaatccggaacttttggttttgctctaatcgatggaggaagatgcagtggtacaagttagtctctagttttctggtgggtaaatattttcaaaaccaactaacttttctttttttaaatctgccttttaaagaactaaaattccagatggcaaactcaatgaatggcagaaaccctggtggtcgaggaggaaatccccgaaaaggtcgaattttgggtattattgatgctattcaggatgcagttggaccccctaagcaagctgccgcagatcgcaggaccgtggagaagacttggaagctcatggacaaagtggtaagttctgtctgacgttgcctgtgcgaaacactattcactttgtctgtggtttctccagatttatttatactgttaattaataccaaccattgttatggcaacaatcttttgatttcaattcatcatttttcttcaactctgtgttttttgaaaagttggattcaaagacttttttgttttttaacctttcatcctttctactctttaaggttcagagttcctctacatgactcagtatgtaaagttttaccattggctgctttttgttggtgtatggccatagaatgcttggaagtgtttgttctgtcttctgtgaggttgtgttgctcttagataacaaaagagtaccagcaggttatttaagtctttgaccactcatgacaatcatctggtatgatactgaaaatatttactggggaaagaaacagattagttcttaagtgaagaagcagtagttgagggagtttccattttcatctttgagaattcatcttcattaagaaactttttttgttgttaatgggagagttaacagtttctttcatctactattccattttgaaacaggaaacctttcgatggcacattgtttattgtgaaaggaaaatttatgttgggggtggtgaggctgagagtatcagaaacctctgtggtttctgcatgttgctttcagacaaactataatttcacaagaagaaatcatgatgggtgtcagtatccagagaagtcaatctgaataccttacagagatttactcagaaactgtagctgtcagtatcctaccttactaagtatgattataaaataaatttaagatgtagcttgctgctttgcaaaaattaataattcttttttttgaagcagtagcactgtcctggatttattagtaaatgtttggaacacattatgactttatttcatagatatctggggccaattataagtttagttgaggcaagactcagtatctttataactgaagaaatggaggttttaaaaacaaatttctgtgtaaggatgtgccaaagcatccatgaaatcatgtgataacattcatctttgctttgatttgctcctgtctgtaaatattggctataaaagccactatcagtagtagtagcaacatatgaatgtgacaagatttccattattttcatttattctgatggaagggacacacagatgaatgactggcctgtcattctacaggcaatggtgctaaatgcagagccagaatatttttgccagataaatagccttagttttgggcttcagtgtgacctatttacgcttctgccaatttattcaaattgttatattaaagtgctccagacagaatgatgtcatagtgtcagaatattgcaacttgctgcttggggttcagttttgattttagcattggatactttagaataaggactattcaattggaaaaatagcatatatttgtcaagcacaatgctgcctatcttgtctttgctaaagagtgtgcatttgaaggtcactctcactgcctaaatcattagttggggtaagagaaggaattcaaggtttttctctaacttatctgctacgtaagtggacagcaaatggttcagattctataaaggggctgttctttttcccccaccctccaactttgagtggtcagtgtttgtacatttgtgttaggacatcaaatcaaaaagatttatataaggatgtggtgagctatagttactataaaatcattatttttgaaacattaaaaatgatgtacacaattttggtctgtaactggttgttaacataagttttattcacttttaattatttcaccatgagttatggtaaaatagatggttatttgatagttaaacatctgctattgtttattttattaacccttctgtgggtttaggtttagtctctccaattgagaaacttgacccaacaaggaaatctattatcaaaagtctctacttagtgggatgtgggtgcgggtgttggcaaatgtacattgcctgtttgtcttcattatttgtcaaagatgaaaatggttgtgttcatttgtgaatgtacccaggggctttgtggagagaaattgcataaattattatgaaagaattcagtatgtttatttttactgtaagatacagtaaatagaaaggcattgataattactaattggcagtatataagtgtgtagtacagaaacatccccctcttttgtttatcttttcttatttgttagtggtgaaggaagtggctcataatatcaacattgtcctgatgattacatcaggaactttattattagttctgaagttaatcccttgacacattacctttttaaaaaaataactgcaatagcatgaatttagtttgtgaataacagaaaatagcaattttcaagtctaattggtaggtatgtaaaaggcagagttaagtgtatagttaatatttttttcttatgaagcctctttgcaagggtagatcttggaagtataaatatgaacacaagcttcaatttcagtgtgtttcagctaccaataaagtaaaataactatttttacagggaataatgaagcagtcttgggttgtaggggaaatatctagtgagtatgtagttttaccatttcttggcctctggaatttaaaatggtcaattgaaattctttccaattaatgttctgttttcagagggcaggcttttgctctaaggtcactgagaataggagagcgtaattgctcagttgtgttccttataagatgtagagtgttttgtaacagaaaatcagtagcacagagttagcatagtctatgttttgaggaaaagaatagtagatagtagcatatcccaaaacatcccattacagattttctggccttagctctgtgtatgtgtaatttgatagccgacccagaagccctcacatcagtggatgcttatttgatacagtgatagaagtattaatcatgaatacatatctaggttcaagtgcgccagaatgaaatgtggagtctgttctgaagctactcaagagacaaggtttcttaaacacttaataaacattttttgagggcctactgtgtttccactgagtgctcgttactggggatatgaagctagacaagacataatcccgcctttgacctgtcaaggaactcagagaacagtatcagagccaaacacataaatggataattgccatgtagtatggaaagggctatattacaaaccccaagtacagtgggaacagagtagagaacatcctccttgtttttctggccagtgttgagacagttttctgtctggattctgctggccattgccttttaggaacagcattattgtgttcttgttggaaatgctgaggtgagagtaaggaaatgattactaatcagtatggttggaatgataatttattaatgtgaggttcctgagcatggttttcataagaatcttagccaggtgatggaaaatagaagaaacaattttccatctaatagatactaaatgtactgagcatacatggatgcttaggaaattagaaaataattaattgatgctgaagagcaaagcactctgagtacctgcctcaaatttttgttttgctgtcctcgtcatttattttaaattacattaccaaaagaatttaaaaagcatttaggaagtgatgatgcccagtaggcttttcctgccttttgccctcagtctatttagtacatttttcaagcttgaaatataatttacactccttttaatttaattgtgatcataatatattttaaagtttgtcaatcaaggatgcttggattatatataaatattttaaagaatacaagtcaactttcttttctaagctgagttcctcatatctctgaaagatattccatgtggactaagacaggttttagatgcctgttgtttgtgtttactaagttggagactcttacattcctagagccttaaaaccagggatatcattcatttgaattatacttcttgacgtatttccttttcctcactgaagttgttccaccttagcagaatcatgggttgtggtagacttggttaggggataataacaaattgtctggacagttttgtttagtactcagttcagttttgaatttgtgttgtgataaatgaagtgatcccaaagtttggtacatgacttcttagaaaagctattgataaagtgaaagatttaaaggaatcatatgaagacttaccttggtttatccctgtgatataaggcattcatataatgcaggccttaatcagttagtagtcttttaaatattacagaatttttagcattgagattttgaatctatttctttcttctttttagaaggtgctttatgtgctatctgttgatttcatcattcatttatcaaatctcaactatggaaagacagacatttccaaatagctatgccatagagtaaaatgtagtaagtgctttaaggtagtataaataaagtgctgagatgtagtacgtggtagaggtgaaccgttgcttgctaagggtgaaaagttggtgtagaatgaagcatggaggaggtgctggccagctcatgggttggagtccagtgagatggaggacatgttaggttgaaggaatgatagattgttgagtaagagaggggaagttagggtaagatgatagaggttttgattgcttttgtcaaataattttgtcttaatttatttggtagaaaaccattgaaggctgttaatcagggagggaaaacttcagggctgtgctttgatagaatacttacttgactctgtaaagcttgaattaagagaaaaaaactgaaagcaagagtaatgatcaagaggaattaaaacagtctgggcaagaaataatgaaatgctggcctagatacttggaagtaggtgtagcaagtgttggttcagatgtgggaggcattttggaggtaaaatctacaggtcttggtgaccccttagaattagaggatgaaagagaaggtgcagtgaaagtgactcttgaggttttcagcctagttgactccgaaggcagtgatgcacttaatgaggtaaggaacgtaagaaggaaaagaggaagtgtgcgggttagtttttggccatgctaagttcagtgtaccagagtgaatttcatttaaaatcagaaaattaagtgtacagttcaagagagaagtagaaacaagagacacatatttggtagatattctcatagagatagcatttcaagctatataactgtcagagatttcggaggaagaatagagggagcaatgcagagaaaaagtcagataattgaattctggggagattgaggggtgtaattaaataccagagaaggaaagagaatcctacatagattagtgatgagaaaggtagaattaaaccataatgacatcctaggtacaaacagctttaagaagaagataaaatctgaagttctgataaaactaagttcagattcaagtagagaaaaccaaacagggtgaaaaattaagaagtcattgaattgtatgattagaggccattattgacctttgtggagcagtttaacttatgtgatggggtgagattaaaatgagtatgtggattatttaaaaattgttctagaactgtaacaacaatgaaaaggaagggagttctgttagcttgaggatttgaacatcattgaaataactctgtgtgtgtgtgtgtgtatgtatgtgtgtgtgtgtgtgtgtgtgtatgtgtgcacacaccataggagaggttcaaagattggtgggaaaaaaaaaagattgatgggaaaggatgtagttagggaatggcctaagatgcaagggaaaaagaaatagttgaagcagtagcattctagattaaactgtgggagggaaagagtaggaacaagtagaagggttaatcttggcgaataaatgtaacttccacttacacaggaggaaagcaagggaatatacagagaagttttgagggaatttgtaaattttatattgggttgtcaggaagtgatttaaggcataatatttataatgtttaaaccatgtttttaatttttatatcatgaaatatgcaatatatgtattttaactagtcttctagcatttaagtgggtaaataagtaaaaaattaaaatggaaatcaattctcatctttaatattaagtttatcttattatacacttgctgtgacttagaggatgccacagtgctatttttatctactctgcttgggcatatattaataatattattacaattttactaaaggttttttttgtttttaagtatttgtaggttgctaatttttttcaagtaatgaaagacacattttgaaaatatccaacacattttataggtttttaacatagttacatttagatgattgttgagcttatattatcttacagtatcaatgaaaaaagtattaatagttataatattctacctgttaaaagatttaaaaaaatattaaagccctacgtcttttcctgagagcctcttgggtttgaagaaaccagaggattccatgtcagctgacaggaacactgacctgggcttagccttatttcctgcttttctgcacagaacattccaggctttttaagggttttaggcagcatgagtaactttatgagctaaaagagcttctaaaaatcatgatcctcaacaaactgttcagtgcccttggtctaattttcatacctttgcaaaatctgcagggattttgccttgtgatggaatgtaaaatatggaagggagaagaaatattaagaaggagatagggctaactatgttctggacacagtgcatagcactttacatttcctcttgtaagaattataatatcctaagaggtttcccgaagaagaaccctgcccaaggttgtaaagctagtaaatgttagggccagatcctaggtttgcttgattctaatgtctgtgttcacagtatgaagagtgaagcacactgctccatggaataatatgatgcttcctttttccaaaggaagtaaatcaaaagggcatttcccctcctccacttccatatttgatattatcaaattcttctccaaactttgtactcatttttaggcagctttattcaatgtagttgtggatatgctatttgtaatataattttcctgagaggttcgtccttaccttgtttgcttcctcctcctcttcctcctttctgccatcaaatatttgttgcacatctactatatgcaaagttccatattaggtgatagagagagaccaatgagaaagactgttcttcactttcaaggaagttccattctcatttggaagaaagagagtgaacagaatacacaattgatattttaattacaactagtcagttctttaatggtgcttcttaatgtcaatcttctgaagacatcttcgtggaaaaccataaaggtcttggtaattttctgtaaattcagctgtgctggactcatgatcaattttatatgccaactttgttttgcccaattaataatctattaaaaaagtgtatttttatacttttttacactgtacatttttatacttagtaaaatacatttttataatttttatatttagtaattatttgctgcattaaaatggaaagaacccaaagaactcttcggtacctgttattataaagagagagatatatatatactttaggtcactgtaataagaaacctcttctaacatttataggaggaggacagggctttcttttttttttttttttttttgacacggagtctcactctgtggcccaggttggagtgctggagtgcagtggcacgatctcggctcactgcaagctccgtctcctgggttcacgccattctcctgcctcagcctcccaagttcctgggactacaggcgcctgccaccacaccctgctaattttgtttttgtatttttagtagaaacagggtttcaccgtgttagccaagatgttctcgatctcctgacctcgtgatccgctcgcctcggcctcccaaagtgctgggattacaggcgtgagccaccgcgcctagcccagggctttctatattgtttttaagaatgaggcagttcacttgagagtatatgacttgattcagtgtaactgaatgctccatgaagtgaggcgtgttttataatgaaagtcttatagtataggcacaattccttactgttgaaattttcattttatttggtaagagttctttcctatgtttcacaggctggtttgaaccttgtttgcaaggaatgtactatctgatctaatacatttttattaccttttggctggaagttttaattaaggcgcagtcagaaaactctttaaatgcaagattattccaagaataagtaatgactttgaaaattcttatagcattagtaaatcctgtttttgtatttgtgcttttgctttgatatggttgaatatatgtatctaaatacatatttatgtattggaatgcatagccaatatattaataatatatttttattcatgtgaaacaatgcatgtacagagagagtctccttaaatatttctaatacatttaagcaaatacaaaactcagttgtatattggtatggagacagttcctgattctcaagtccagctatcagggttctgagcagtaaccttagttaggttctagttctgtatttcaatattgacacgtcaaaaggaattggtcctggtaatttccaaattttttgagtcaatggctatagtggaattttcagcctaattccaataataaatgttttgccttttagttcaacagaaaagagcaatattgctattgaaccaattcttttatgcaccaatcggtgccctacaaagttcatcattttataatgtgactacagatttgttctttgtcaaagctcttctgtgttagtaccaagcttcattctaggaagcaatttaggtatttctagaagaggtgtaaccatttgaatctgaacttgaccctggtggtgagcttgattttctctctaatatactgcctttagaaaagcaatttttctttcctggcttttgcagctccttgcacatagcaggtattcaataaatatttattgaatggaattgaatttgacctgcttagaagtcatagtcctgatgtagggttattcatttttggcagaagctgtcataaatcacagggtttaatagtaatccaactgatgaactgcgcacccagtggcataccgtagttcagcattgtatgttgcactttcccaagtgcaaatttagaaaacagtttagcctacagggccttgatgaactgactctggcctatttcagatctctcgtactactcactcacagccttccttcctatgctctgatcttttagaataactgcatttacttctctcttaacatgcttgctctctggtgtctcttaagccttagcacactcctttgcctagaatactccttttggcaaatttaagtatgtatttcctgacactcttatgtggagatgagtgagctgctgcttttctcctgtagcagtttgtacttgcctccatcatagcactaaattctcctgtaattcttttcctaagccaccagtctttcccactaggcagctgcttgagggcaggtgtgtgatttattcctttctgtgttccctagagcctgaaacaatgcctgccacataaatgtttgttgaattaacaaatgggtcctgaagtttacgtaaatttgcaaatggaataaaataaaaatgtaaatgagtttagcagggatcattaattatatgcctaattttaattaaattgtgatacagttagaaagatcagcccgagattcagaagatacaagctcttgtattggattaatgatattttaatggtcccttaatctttctagttcttagtttttttaaatctggaaatgaatggattgggtggaatctttactaagatcccttagagcaagaattacattgctcttaagttaattatagagaactacgtctcttctgccagactctttgcatctctttgaatcaggaagtatgttctagtcatctataatttcctagctctaagctcagtacctggcatatagtagttcaagcaatttccacctgataaagcaataaattcccacatggaattacagttttaaataaagcaaatgagaaaaaagttcagataaagaatagtgaattaaatatttgtaaaacataaacgtttctgtcaaagaatatttatgtggaatgtctggaaaaaaaatacctgacagaaattttgtatgtatcagttaaaaagttctctagtagaggaaatgaatttgaagctacctggtccccaaactagaagaaaataatgtatcagtctgtgacatgttacaccaagttttatgttgctgacattaaactatgcctgctgtagaatgttggtggcaatattcttggtatttatgtatacttgtgatagtatttttggtttaaataatttaaaaaccatattctttttcaagcaggatttgttaaataattggcatatttgggacttaatctttagggcagaatgaactctgattatactaacgtatcacgtattaaaaagggggtaaaaaaagctctgtcagccattttcactatactttgtaaagatttgctgttatttagtaaatgagatgacatcttacctttccaaggactttcttggagataaaaatactattattactttttaactaagcctatacctttggattattaatttgaatacttgatactttagagttcaattgtaaaaataaaggaaataatacaatcaaactatttgtgaaaaaaaaatagcagtcaaccaatccattaatttgttggttatgtactcagcaattctgctttaaggcattgtttacaaagaggaagaatataagatcatgccctgggttaatgtgaaaaacatcttaaattagaggctgatggttggaaatttgaaccagatttttctctccatctactccctctgaaaaaaaccctgatccccagtgatttcttttttttttccttttcttttttttttttttttttttgagatggagtcttgctttcttgtccaggctgagtgcagtgatgtgatctcagctcactgcaacctctgcctcccgggttcaagtgattctcctgcctcagcctccttagtagctgggattacaggcacctgccaccacacccagctactttttgtatttttagtagagacagggtttcaccatgttggccaggctggtctcgaactcctgacctcatgatctgcctgtctcggcctcccaaagtgctggggttacaggtgtgagccactgcgcctggccaatttctttaagaaagtaagtgtgatagtgtgtataagagtaccctttaaatttgttagttccttgatttattgtgttcgttatgcttgaagttattatagttcgattgtttatttgtcccaggcacttttatgggtgcccagaggcagatccatgttttatgtcccctgaaacttatatgatttgaaagaatctttctaaatataaagaatacgaaagtacaaacatcaaattgtttatgaaagtgaattttttttagaatgagaaaaatccacaaagcactatagtttttaaaaagccggtatatctacaagtgattagagaaataatctagactagtttttggctctgtacattttatactttgattatcttccgttaccgcatatacttccagttttgggtgtcatgaaacacattcaaattgccagatttgaattggatttcactgttcccatggtaggctagtcagcattgtgggcacctcaggtatttctaaaaccatcttttaaaaaaagttctattacagatttaaaaaatattgtatttatttaaggtgtataacatgatgctttgatatatatacacatagtgaaatggttactacatcaaataaattaacatatccttcaccttccataattacctttctgtggtaagaccatttaaactctgttctcttagcaaattttcagaatacagtattattagctataggcctcatgctgtacattagatctccagtattaattatcctacataacttcaaatttgtactctttgaccttcttctctccatttcttcccctccccatccctggggcccacccactgttctactctctgtttctttgttgcttaactccttcttttaagattttgcatgtgaaaatgagatcatatattaatagtatattctttctttgcctgccttatttcagtttcattgggattgctgacagtaattaaaccattttacaggagtgactgtatgcctcacatataccttccattaaacccaaagtaaatgtgtcttcaattcaaatttccattagccagattccaaaaatacccacagccactccagtgccacccaacaggaggctttagccaattatgtttaagatattatactcttaggccgggtacggtggcgcacacctgtaatcccagcactttgggaggccgaggcgggtggatcacaaggtcaggagttcgagaccagcctgacaaagatggtgaaatcccgtctctactaaaaatataaaaattagccaggtgcggtggcaggcacctgtaatcccagctacttgggaggctgaggcaggagaatcacttgaacccgggaggcagaggttgcagtgagctgagatcgtgtcactacactccagcctgggtgacagaatgagactccgtcttaaaaaaacaataaaataaaataagatatactcttgacaatttgacaaaaaaaaaaaatacaacgagggccttagaagagagccatgtatctttatgatctttatgtgaacatttaaccttttgtaagagtgctgtcccattacactatataatgctactgtgcaattctcaattatttcatttgaaagttatttatgtaaagagttgattatgccctttctggagggataagaatgtggtggactaacttactcttggctaaatcacatgaacatgtagaagtgaatacattagttggattactaccttctctggccggcagaaggtactttcagttctgcaggcagcccctgaacgccccagtggttgggcagcacctgtgatgggatgactgaaccgttatatgccacatgtttataggcgtggtagacagtatggggaggtggaaaagactggttctgacctgacacacatttactacttaataactcagttattcaaattgcacctctttgttttattgtcctcggggttcagaacagtacaccaaaacgctaattaacaaactatgagacagcaacagctgggaattcagtgtagtaaaataacatataaatgtgagacattggttgtcaacagagaaggcccatttcctcatttttatttaaaaaaaaagactatcagtgatatacagtgattagcatactggagttcttttaagctatgcacaatgaggtatcttagaattaaactttagaggttcaaaataaggatatgatatagaaaagattgaatggtaggagaacagaataggatttatttatattatgacaaacgtgactatcagttaataaattggagatagtaagttaagatcattatttatattatggaaaaatgaagaaataggacatggttctctaactttttaatttttctgtgaaataaaatattatgacttattttatttttatctttgtttttaggtaagactgtgccaaaatcccaaacttcagttgaaaaatagcccaccatatatacttgatattttgcctgatacatatcagcatttacgacttatattgagtaaatatgatgacaaccagaaacttgcccaactcagtgagaatgagtactttaaaatctacattgatagccttatgaaaaagtcaaaacgggcaataagactctttaaagaaggcaaggagagaatgtatgaagaacagtcacaggacaggtaagaagaatatttcagatgttttggtgtaaaggtcatttatgttgctttttacttaatagttaacctaaacgtcaccatgtaattgttttggggtaaatgtgagtcgctttgtatatagtcatgtggtacttaacgatggggatactttacaagaaatgcatttttagacaatttcattgttgtgtggacatgatagagtgtacttacacagagctagatggtattacctaccgcacacctaggctgtatgatgtagcctattgctcctaggctgcaaatctatacagtatgttactgtactgaatactgtgggcagttgtaacacaatggtaagtatgtgtgtatctaaatatacctaaacatagaaaaggtatggtaaaaatactgtataaaaggccgggcgtggtgggtcatgcctgtaatcccagcactttgagaggctgaggtgggcggatcacttgaggtcgggagttcgagaccagcctgaccaacatggagaaaccctgtctctactaaaaatacaaaattagcccggcgtggtggcacacgcctgtaatcccagctactcgggaggctgaggcaggagaatcgcttgaacccaggaggtggaggttgtggtgagctgagattgtgccattgcactccagcctggacaaaaaaaaaaatactgtataaaagataaaaatggataacctgtaataacctgtataacatgcatggagcttgccagactggaagtgagtgagtgaacggtgagtgaatgtgaaggcctaggactgttactgtacactactgcagacttcagaaacattgtacacttaggctacactaaatttataaaaaaaatttcttttccaatatgaacagcctactgtcacatttaaacttgataaacttttaattttttttaactttttgactctggtattaacaattagcttaacaaaaatattttctttctatattaccctataagctttaaaaaatgttaaaaaattaagttttaaaaaaaattttataaactttttaaaaactaagacacaaacacacacattagcctaggcctgcacagtgtcaggatcatcaatattattgtcttccacctccacatcttattccactggaaggtcacacaatatgtaactttttcagattggcttctttcacctaacaatttgcattttagcatggagcaataacatgcatggagctatcatctgtgataatagtgccttcaggaatacctcctgaagggcctgcctgaggcccttttactgttagctgttttttaataagtagaaggaataccctataaaataatgttaaaaagtttatagtatagtaaatacatcaactagtaatatagtcacttattataatatcattatcaagtatgtgttatgcataattgtatgtgctatgcttttatgtgactggtggcacagtagatttgtttacaccagcatcaccacaaacatgtaatatgttgcactatgaccttgtgatgactatgacatcactaggtgataggaatttttcagttccattataatcttatgaaagcactaacataaatgcagtctgtcattaactgaaatgtccttgactgaaatgtcattacggggttcatgactgtatttgcttttaacattaatagctttatgtgaatttacttatgatagtagctagttcatgagacagtattctcaatgttttaatagacttcattttcagagtcattttaggtttacaggaaaattattcagaaattacagttcccataaatctcctctgcccaagcagtttctcctgttcacatcttgcattggtgtagtgtgttatagttgataaactattgttgatacattattattaactaaagcctagagtttacattagggtccactttttgtgttgtgctgttctatgctccataaatgcataatgtaatatatccaccattacagtgttatatagaattgtttcactgccctaaaaatgccccgtgatctacttactgtctcacttccccccctgaacccatggcaaccgctgatctttttactgtctgtgcagttttgccttctccacagtgttacatagttggactcacacaatatgtaactttttcagattggcttctgtcacctaacaatttgcattttaggttcctccatgtcttttcataacttggtagctcatttctttatgccactgaataatactccattgtgtggttgcatcacagtttggtttttcactcacaccttgaagtacatctcggttgcttccattttttgggtaatcatgtataaagttgcaataaatatttgtgtgtaggtattcatgtggatttaggcttttaactcatttgggtaaaatacctagcaagattgctagattttcagggtatgcataagtttagaaagcacataagaaactttcaagaaagtttgtaagaaaccccttgactggttccaaagtggctctaccctttttcattcccaccagcaacgaatgacagttcttggtgctccacatccacaccagaatttggtattggagacaagtgttttaaagacatagtttgattgaatctgcggatgtggtagatgtgggtgggagatgtaacttccatctgtgtattttgacttaagtgagaaactgaactgggctggcaaagactgaattgacatcaaccaaatcctaattttatagccaggattcttcatttagatatcctcattcaagtttattgtttggccattctaatgttaaatttcaggatctatcttaaacaaaataaggaaaatgatagagttttccatttctgggctattttaaatatatatggaatattcatgatagtgatagtttatttagatttccaaattggaaaaccaatattaatgaaaatatatagtgtcttaacatgttagttaaattttagtgtgagactcttaacctctctgtatttagttttctgacataggaaaacctttaagaaacctctaatatttctttcaggtcagaaaaactggcctcatagggttgtaaaatagaaaattcagttatggaggtatgtgaactctaaattttctatgaatactggccaaatacccataacaagtaaaaccatcaaattcaaacataaaaaaccctcttccaggtgtaaaatggcataattatatatttataatttataattttctctctcaattagagatgaacccaaacatactcgtagacgtctaaccaattatgtaactttgggctcgtcacttaatattcttgggccacagtttattcatcttgagggtggtgaatcttcctgttgccttttagcattaattaatgctttaaaattctccaggaataacaagaggaatttgagttgccacagtgtgacagaagtaaggtagagaaatattatagtgattgtttattcttgtacacttttcaagaagtgctaacatcttgggaagtcagatatttatgttaaatttttatttttcacattgtatttctgccattgacctaataaaactaagttctttacaaatgtctttataattcttttttcaaatttagtagttttgaaattcttcctgatccagccaagtcatccattaaattttactctttagggtatcagtacattgacaaggcatataactcctttgactaggaatttgagtggatacagtgttttaattggatgtaatcatatatgatgtggtaaacttgtatcccacttttacatcttctgtggaaacttgaaacattttctaactcagtagatgttttataatttccatttgataattttgatagttttgcttatgtggaaacatttcatgggagacatttaagttttgtttgataatgtatagattcccatagattttgatagctctcataatgctgactattcacaatgaggtcactcattctgtgtattcttgcctgcattttaagtgtccaagtgaattttgttcactgtcctaaatgcaaccctaagacaaaatttattggtttctatgctgatatagcatatccttaattggatattactgttatccttgttctgtttactgacaatgttctgtggccagctgtgtttatgcagaatttacatttgataaatgtttcataacaattcataataatgtaccattcttggtacaccataacaggcacataaactttcgaactgtgtttctttttctagtaatatatttggacacattcacttctaggttcccttaggattccaaatgcaaactgagtctaaaatgtgccattgcacatggagctctgaggcattttgctctacagaacacagaagagtcttcttagcatgttttcatttacagagtggcctcattctgaatagtcagcattatgagatctattgatctatgaaaatctgtacattaccaatcagaacctaaaagtctcccatgaaatgtttctacataagcaaaacaatcaaaggtagttaggcaacaaagtatatggtttagtagaatgactccacctaatcggtatgacaacgctggttactgggaatattataaattcactacagaattgtttctttgattctgtaagtagctcactagggacattactataattgagctaaaaatgaaggacagtaatagtagaaacagtaatttggagttaattgacttaatcagtattacttcatgtgattctgcccgctttattgaagaaattgtgctggatgagtacatgaatcaaaatgcatattttaatgttcctgcacctctgttgtgtcaacaataaatgcggattgttatacatttaaggggagatgagaaaaaatttaggtgtcaattctgaactgattgctttttaaaattttagttgattgttaatgatgaatgagtagcccgaattttaaagcaattttacataaatgtaataaatagaaagataaagaagtaaatggcattcaatacatttcctagttacttaggtcctgtgtagaaggagagaggtagaaattatagtcacataattgtatatgctactgaagtagatatttagggcacagtgaaagtcttttgccttgagagtagataatgatttctagtagagaaaaggcatgagcaggctgcatgcctcccccgactgatacagtaaaccttcatcttttatatcatttttcccaaattgttgttgttgctggtgctctgttgttttgttctttttctttctttctcttttcctgcaaacagttcaatgtcacactgagttggtgctactccagctgggtgtctaaaccattctgagctgacatttctgggaagagtaattcagtgatttctgacaagcataaagcttgcatgtgtatgtgtgtgtatgtgtggagagaaggtaaagaacatgtggagaagtctgtagtttgaagcatagagaaaaggagaaactctaagtattatattacttaaagttttagtggcgcaagtaaaaatggatgtgaaggttgtcattgctaacaaatgtataattgataggaggcatttctatgattttactggcagtttcatcagttaaccattttaatagtaaaatttatttcttctgaaaagtgtgtattaatcagctgctctgcaaggtctggtgttggccactgtgttttttaaaacactcagatgatggccgaaggatactgagattttccctatttttgaactgcttgagtgagccagggtgctacaacccattttcccctcctacacactgctagacaaccactggaaaaaaagtcaactgaggtggaaaaaatagctctgcctttgatagactgtgaagaaaataaagattaacaaaagctctggccagagaggaaaacatagatgttgccttaacattaacattaatgtcatttcagagcctttgaatcatgccttaataaccagtgttgtagaaaaaataaatgacaaaatggggtgtgtgtgtgtgtgtgtgtgtgtgtgtgtgtgtgtggtggagggttacatgttctgtagttaaaaaaagtatttgacatagaaaaattagctctagaagaagctagcctgtatttaaaaggcttcaggagcatccggcagaaatatttttctccattgactgtttggctaaacaaagaataatttgtaatctgctccattaataaagtgcctttccccttaaaggactacagatcactatgcttgctgtttctacttgtgttggttatttacaagatagtgtaccaaaaaacattttgcaattggtacgttgaagatacatggttaaaagttgaatcaaaagcaacagcagccacaataataacaagagcaacaacaaaacaaaagctgcaaacaaacctactttctttccttatgttactgtatgacatcattgctttgagtaaagaatacagtagtattaatttaaatgcttaaatttatatttatacaaatgttgatagcatggtcattgaaatagttttgcaagtcctcacaggttttcagtttaccatataaagagattgatctgtatgtgtaatttgtgctttaagtggtagttttaatagttactggacctcacagtttaatgggcatgtttataatgctacatcaattaccacattttctcatagttctgtatattgtgagaagaaaatgaaaaaagtgctgtttaactaagtacaggaatgtggagccaggaaatctcatgctctgatgccatttcttctcccagtgttctttgtaactttggttggcttcctgactccaatttacattttttcagttattaaattattttctggttattcataacattttcacctcagacatttcaatgtcacaaatgaaaattaagttgtttcagactaaatgctactgttgctacctcagtctgttaatatttcaactttagtagtagtttctatagtaaaaatattgtttttgttattataacaattatttgcaagagaatcttaagaaggtttgtcttttataaataaattatactatattggatatctatgaaatatgtaatgatacatgaaagggaatggcttatattcatcattaaaataattttacatttaaaaaattaacctagtttttctgtttctcctttttttgtttactaatggtgaaaattgcaattattttgaatttgatgaggacaaaggaccaattgcaagtagaaaatatttctaaataaatcaaaataggcaactaatttcttttgaacacaagtattttgatataaacatatacatttactcattttttctatatttgtttgcattcaaggcattttttccttttaaatgggaaactagaggaatgaaaatatgaatttttgatacttcaaaataataatttttatcttggattcagaagacaaatagtaatcaatctcttatgtagaagtatgtctgccagataggaagtagaatttgctttagaaagcttgaaaaatcttctgagattgatttattgtaaatgaataaaaagtttattttatcttgatgagaatgtttttatgcatatttcaagcatctgagtggtgtgaatagacttttctaaagtttggaaatgaaggggctcatttctttaacacaccatgaaagtagaggccacaagaaagttatttagacaaatgttttcaaagttaaacaaagggagtctgttaggggaggcaggtgagagcttgcagaatctttgactgttaaggactttatggccctgtgtatttggctaactgcacccctgctgcttagctagctagatacaatgtaattttcttgttgatttttcaatgaaaagtgaaagttttttttttttaatagcagtttcctctctagggtatattttacaaaatacaaaagaaaacgaaattattcagatgtaattaaaatgaattccaccattagctttttaaattttaataaaatgcttacttgtaatacatttatttgctatttatttcatttatttagtttagtttttttttttttttctaagccccatgttaatactgttcagcccccaactcctggtttcttagtaactaaaacttattgcaagtattttaatttcttctaaatcagattatatattatgcacatatgatatttggatattaaaattgaggacttttttcccccacagatgagcatttgttaaatgtttatatattcctgagaatgataccaattattatatatattaagcaaactcacaagactcaagtgaacttggctttgcagtggaataccgtttatgtttttcagtcttaggtagcttattaaaattgatgttttcctttcagtaaatatctggtgacattaaaatttgataattaaaatccagaagcactcaagaaagaatgcctgcttttagtttcataataacaatactcccacaaagaaagttgatgaatgatgtctttcaagtggcagagttgttatttagttaaagaaagctcctttggcagtttcttacaaaactaaattaaagtttgtttataaaacagacaagctacagtgataatcctatagcctcaagagtgcttggaatctagcccaagaagagtcttgtttttcagtgatttaacaaagaagtggagtttccaagaatccaaacagattagcattcagtgctaattgggtagggtgtaaaatagtattcatgtctgattgttttgatgtgaagtacttcataaccattccgttttctaaatcttttaaaaatattaatcttttgtctcttcagatttattgtttgagcatgagtttttgtttgaggatatatgtatacatcaatggttcatagatgtgctgtaaacagcaagacacatgagatcattacaaaaagtgccctttatagattaaaataataaagagagattgaggctctgttgttcagtggaaacattgaagaacaaattaaactgaaagataatttagatgttctattgaaatgtattactttgaacatctgatcatgtgattataatataccactttcacatataatcacaaatgtgtgactgtatttgtttcttcgggctgcggtaacgaagtaccacatactgggtggcttaaacgagagaaatttattctctcacatttctggaggcaagaaatctgaaatcagggtgtcagccagcagggccttgcccctcagaaccctctagaataggtaatttctttgtctgtctcagtttctggtagctccaggaattccttagcttatggcagcgtaagtctgttctctgctctgtcatcacacagtgttctctgtgtatgtacgtgtgtgtccaaatttccctcttacaaaaacaccagtgattttggatcagagcctacccttgtgaccccatcttgacttcattacagctgcaaagatgctattttgaaacaaggtcatattgacaggtaggattgaggttagaatttaaacatatctttttaggggacaccattcagtccctaacagtgaccaaatatggcagtgtacatttatactaaggaggggaagaaagttgaaacccattagaacatgtcatggaggtttgaaaaacttggattaatagaatataatagcaaacaaaattacttgtaattattttttgtaaaggtctgtagctgaaataagtttttttcaggtgtgtaatgcatggttaatttatgcattagtttttataaatatattggaaaacatggcatattctgcatttcccaataatacatttttgtatttattgatataattgaatttgtaagtacctttttttaacattcttaccgattttaatgtataaagtgccatctctctttagaaattattagtaatacaaatatgtacatttaatttacatttataatattaatagccctggttatttcttaacaatccctgttttctttaattttgtgataatctctggaggattaattagaataattataacttattaaatctgtttataaacttttccctattgcacatagaaaataaataattgggaagtgttttccatgttggtgacaaagagaaggcaacaaacaccacattcattttgtctttaatattaaaatatggagtattaaacatgatttcaattcaaattttaggaaatcaatttgaggattttagtttaaacaagagtaaatgattgtttctgaaagtggcatgttgaatggtttaaaccatgggtcagcaaactgtacagagccagatagtaaatagtttagactttgccagatggtctctggcaattagtcagcgttgcctctgtactaggaaagcagacatagacagtctgtaaattaattgacatggctgtattttgataaaaatttatttacaaaaatgagccagaccaaatttgaccattgggtggtccttcgccaacccttggcttaaagtacctatctaatttttggagagtaaaattttaaaactattttatcaacaccaatccatcatataagttgcattatatgtaagtttcatcaacacagactgagtatataagttggctaaaagtaacaatacccatctaacagtacaatgctgtcagagacccaggctctttctggcttattgtaattcatttccttagcatgttgggttttatcttcattctgttcccttcacagttgtggaattcctgttgcagcttcattttttaaggacacaaggcaggaaaggggaagggcaactccacacgtgtctgtcttcttatcttgaattgcaaagctgtcccagtaccttaccacctacttgcttctctagcagattctcttccatattatttaagccactgggtcactccaggttacaaaggtagcggtatattgaaactttgaaatttcagcctccatagtaaagaagggcaagggagaaacggtgtttgtttagtcagtctaaattgtcaaaggagatagccagatatctctttttgagagataaacagacactcttcatttaaacatggtataacttggctttaaggcatatttctttaaaaatatattgtcaaggactgcgaagagcctgaagctactttgccatactttcagggctagcagaagacaggagaatatttggtcggggaaaatgaaccatttattagtcacagagggacagcattaggcaaggggtcatcacttgtgccaggtcaccaaccctcagtttctataggacagtataaagggcaggagacacctgcatgtgcagtggctggcattacagatgaatcccaagcctaaggaccctgaatttttataatggacagtaaacctgcctgactcttgctctggaaggagacattatctttattgaactggactgtaaccctctttttttttttttctccagaggaaaacactgtccctattatctaaggctgtttgatacacaaatgttcctgaaaggataatttgaaaggctggcagtatctggttgcaagacatgaaaaaatgtgggagacctatagatacttctccccaaaatatttatgttctgttctttcttaaaaaccataatgtatctcatgttctcagttttgaatgctacttaagagtaaggatatttactctattttggattattggtaagcttaaaatcttgggttctgggctgggcgtggtggctcacacctgtaatcccagcactttgggaggctgaggtgggcagatcatgaggtcaggagatcgagaccatcctggctaacatggtgaaaccctgtctgtaataaaaatacaaaaaaattagctgggcgtggtggcgggtgcctgtagtcccagctactcgggaggctgaggcaggagaatggcgtgaatccgggaggcggagcttgcagtgagccgagatcacaccactgcactccagcctgggcaatacagtgagaccccgtctcaaaaaatatatatatatcttggtttctgccattttaatatatataacaaattatgtatttgatatatctaatatgtatattagaaatctcacatatatgtgaaataatgtgatctccagaacaactgtggaaactttgtggtgtgaacatttttaattcctttttttttttttttgaaatgaagtcttgctctgttgcccaggctggagtgcagtggcacgatctcggctcactgcaacctccgcctcccaggttcaagcgattcttctgcctcagcttcccaagtagctgggactacagatgcacgtcaccatgcagagctaattgtttttgtatttttgtagagatagggtttcaccatgttggccagactggtctcaaactcctgaccttaggtgatctgcccacctcggcctcccaaagtgctgggcttacaggcatgagccactgtgcttggcctacattttttattcttgtttgcatattagaaaaaaaactttaataattaaagaaggaacagttttacaaagacttttcatttcaagctcattatcctttaaaagagaagacgattatattttcttctttttttttttttcttgagtaatacttcattcacttttcaactttgactactgtaactttaggtttagacccaaataattggtttcagtaggtaaggaaggttgaaattatgtgatataagaatgatattgtttatctttgttatcagtgtctaaacctcagagatgagcaccaggtagtccaattccattttcctgtgtggagaagctaaatagattggaggttacatgacttgacacactggggtgtgcatgtaatattcatgtgtgatatatttctaaatgaagtttcgttaccagttggcatgtctgagcctacagctgttggcatatgaagggtatcagaattataatgcctttttcaactttgtttcgggaggactcatttgaacaattagcacattttatggttgtgaaaatgaactgttgttttttctcttcattaaaccagaattaatattgtatgtcatctggtcagtcgatgcaacttttttttttttctaacacgatgcttgtattcattaaattcagaaagactatttaaagctttatttttcaagtatacctttttctgtaaatatctcttcctttctcactctgtttatgtatatacatgtgtgaaatattacttgtaactttttaagcatttaatttgtcttgatgggcacagatttttaaaaaggaagtaagaaagattacctagttttttctgaactatattaatgataaagcatctcagctcattttacagatgctgaaaacccttcgcgttttgttctgaaggtttttgtagggcatactgattttctatgaagtatgtggagctgtcaattttattcttttttccagagatttcagaaaattttcatttaactaaagatttccatcctggtcagctgggtctcatttacctgattaaaataggtttgcatggataaagtcttaaagcaaattctccttaccacattttgtgtgaattttttcctctttaatactaattttagtttgttctcattacaattgcatatgtaaaaaatactttttgataaagcaactgaaactttgaagttgataatttatcacaatacttttttccccattatatcaacacttggcaaactacagactgtgagcctaatccaggttgtatttccttctgtgagtaaattttcaatggcggagccatgctcatttatttacttactgtctgtggctacaatggcagaggtaagtagttccatagagactatctggcctgcagagctgaaaacttttactctctgggcctttactgcaaatgtttgctgattcctgcattactgatatcattttcataacagtcttaaaaacttggcatttttaaacttaaatacttttttctttttgtcgctttcttctctaccctatctctgccagcagttctttgtgaattaccattgtgatcttctaaaggcaaaaaaaatggtaggtagtcaatgactgatagctatagacctatgaaactaacatttcctatcttgtctcaatattctgatgtatataatcattttaaaacataataaatttaggccttttttgtttttgtttttaacacaagatatgccactaatgtctgacaagcatttaatctagtggctttcctgcattttccatggatcagatgcattctaatcctctgaaatgattattaaatacagattgccagcctttatataatgcctgctaaatttaccagttgggatctgcacatatattggtaaagagtgccctagcagtttctgaccttctgtctgctttcagaatccacatgagtcaaattatctccttttatgtataatcttatcaaggactattgaggtggcacaggtggggatggaatcctggatgtgttcagaactcctttcattttactaagcttcctttatactaccagaggaatccacttccagtctcgagtcacttagaagagggggccgggcgtgatggctcatgcctgtaatcccagcactttgagaggtcaggagatcaagaccatcctggccaacatggtgaaaccctgtctctactaaaaatgcaaaaattagctgggtgtggtggcatgcgcctgtaatcaggaggctgaggcaggagaatggcttgaacctggtaggtggagattgcagtgagccgagttcacactactacactccagcctggcgacagaaaaaaaaaaaaaaaaagaaggatacatttctgtaaggtttttaaagttttgttggaaaagatggattgcaattctcttcttatgtttttctgagattagcctaatcactatccttggaatttacctttgcttgccagccttttatcctgcccctttctcctccctttcctatttccagtttatgcagatattctttcttattactggcatagctaacattcccactctatccccatgcccatcttggctctgattttctgatcattctagctaaaatgtgtcttttccttctgaccatagcatttatcaaggcctttcatgtggcagttaatgatatattgtcaaatattgttatctttttaaaatggtgttaggagcctgggtaacagagagaccccatctctacaaaaaaaaaaaaaaaaaaaaaaaaaaaatagccaggtgtgttggcccatgcctgtggtcccagctactctggaggctgaaatgggtgagattgcttgagccaaggaggttgaggctactgtgagctgaggtcatggcgctgcactccagcctgggtgacagagtgagaacgtgtctcagaaaaaaaaaaaaaaagaaaaaaaggaaaaaaaaaggtaataggctatgtctcttctgtgtctcccatggtatccagaacagtgctttatacttggcaaacactcataataatatatggttatttctttagaattactataggatgatttgaaaatcctgatgtattcctagattacgagctgctggggcctggagggaggcagaagagagatgttacaatggaaagtgttgaagtgtctgaaggcttgtttttagaatttgtaggtacactctgaatgtcagcttcttcacatttgggaatgagtactggcgattttagaagaaaagaaaatgcttataaggatagtaatatcattattatttatgttttaattataaatatatttcaaagcaactcttaactgtatgtattctcaaaatagctttactgtaataacattcttggacaaagttcatgaaattactacagtttacaagtacttctttaatggagtgtccttgtagctacacttagtacctgtaagataaattcctaaaaaattcacatcattctgcctactctcacaaactactcaaagcaatgagcatattgcatagctttcttattgacttattagttctgtatctgagctccaatgagtgttttcacttcctcttattcttatattaacatttcttcaaagactgtttttgtttctgtgatgtgttgtacttatgaccctgaatacacaggacttttcggcaactggggaatcctccaaaaatctatgctttcgacatgaatagtccagtttcatttggtatgtattattgacagaagtgcttcatcctctttatagcttgctgtgcagcagatggttgttatattattcaggactcttgaggcagtgcattaatacgcgtgcacaatgttttttaagtcttattgtgggaattgtcttgtgtccttgttgacggaattccttaatacggatgaagatttccaaacttgaaaactagtttttaaattttagctaaggctattttgtatttatgtattgcttaactgctatctctttttctttccttttaaagtaaaggtcggagggttggatctaatattcttgctataaatgatttttttttttttttggtcttgttttgttttgatgtgagcatatcagctttgagggacatctgagatattttgaatatgtaggcagggcttttaaagaaaggaattgctgttttcttacatccaccatgcagacttagacttgacaggaaaacagaggcatgtgtgttctcactgtgtattatcgttgcgccccctcacatagctgttagggtttgtcagcagtttgttttgactcactagaccaagggtgggggtggttttgtgtgtttttgtaagttaactagtgtgggatgtcagtaatctcagctttaccattttagttggccatgatcccttcatgtaagaaaccgtcatatttgccctatttctcaggccatactgtggttccgaaacttgcccgtaaatatttgtgaaatagtttttcttttcttataactctggaggtcaaaacccagccctaagataaactcctgtttcatattgcctctgcggggtgctcatggtatgtccccagactaatttgggaacctccttgaattactttttaaaatttatctggatagttcttacacaattaaatttaatttttatttattatagcaagattgaggacactcccaaatccacacttcatttcctgggagatcatgttagacacagataactatgctaaattattttgatccaggtaagcgtgttagaaagagaggatggggctgctggacttcattgagaggatcttttgatttcagaaaccattagtgaaggaaaggtgtactagacagagctgtcataacctttttactatttcttaagagaagtggtacctctgagagttgtgtaacatggtggtcttcccacatctttatcaagagattaattaaggttgtgaagtaaagctttagaggtgaggcacaaaaggcaagcagtgtttacctctaatcactcgaggtaacctttatattggaagatcagtgtagatgtattgtgtaccagataacattccattatgtaactattctttatttacttcctctactgtatgtgtggcatcattccagcatcaagtttaatccttctttgtatgcatttattgtaaactgtcatttatgtgggattaaaataactggaaagcctaaataactggaattcttgtagcatgtttggtacttgacatttaaaagagagacagatggcaagtaaacaaggtgagagcaggactttatttgctgtactgcaatctcaaactgctgtcaagaattttaattagatgttattttaggaagctttcaatttactgcaggtcattgaagcttagaaagaagcagaatgtacaccaagtattttaatatgttagcaatccactgcaattagttaatctggagctagtaggttgtatttttaagagtgtaaacattttactgggtttcagtgtgacttagagtaaaataatttttctgtttaattttaaatcatactattttaaatttctaagttgggcttcagtatcaagttggttgaattaaagatttaaatatttctcctgatgtcttcccttctccttcctactaaactggtgttcatttttctttatggtgatcatttctaatttcccacagcttccctggacatttccttcactgtgagatagtagttttacacatcattcaacatccagttgttcagttttcacaaaaagatttctgagaaatctgacttcaaagttactcttttcaaactgaagctcgtttttagaactattcatgatataggaaaatacattcataactgaaagctttttttgggttattctttgtaacattacatgccgcttttcaccaatgaaaagaatcctcaagaacctggaaaaagcaattcctttttgcagttaaaatgaagataaagagccttgaaaaatggctgatgctaatagttcatggagattaataagtgatatgtgaaaggcagactgtcctgtagttgcaaaatgttacatagtttgtacaccttgtcagcgttgtgataacatgaagtcatagtttaattggtaaacaagaaaagcttccaataaagtgtcccatggatgatcttttcctttgagactgcagcatttctgaagaatatagggtatcttgtgatacagcaaggtaaaagcagggcacatcttccctatgataaatctgtgctcttattgtcggagtttaacctagtccttcatattttgtttctgaatacttgagttcatttatgtatagtggggaagattttgtttttgattttgacttctgtcatgcttgcttgcttacttgattttcttttcttttttgagatggagttttgctctgtcgctcaggctggagtgcagtggcgcaatcttgtctcactgcaagctccgcctccctggttcatgccattctcctgcctcagcctcctgagtagctgggactacaggtgcctgccaccacgcccggctaattttttgtatttttagtagagacggggtttcaccgtgttagccaggatggtctccatctcctgacctcgtgatccacccgcctcggcctcccaaagtgctgggattacaggcatgagctaccgtgtccagccctatttctttatttaaaaatgacaaatacatttatggttgtactacatgatgtttctgtatatgtatacattgtggaatggctaaatcaagctaattaacatagccattacttcccatacttactttttttcttttttaactggtgagaacatttaaaatataccctcttagcaattttcaatatacagtacattgttaacctcttgaacttatgtctccggtctaactgaaatttcgtatcctttgaccaatagctcttcatccactgcctcaactgcccacccccaccccaggaaattgtgattgatatattttttaaggttgttgaattaattgtcttttttgcagttaaaaaatatattaatagtaaaatgggctaggtagagattttttcagagggcaagttaattctggacctgacaaccttaaggtctggaaaaatagttactctcaaatttttttttttaaaacgaaaggttttacttaattatcaggttctaattcccttaggatactggtcttcagtgattgtttaaatgtctcagaggaaacttatataaagtttggaattttcattttaaaatttgtgttgttccaagatttcaaaacagatctaatctagattattattgatgttaaatgatgtaaaataaaagtatatttaattttagaaatttccattaataataaaattattcaaattataaggaatatacccaagaatgtgagttcttttcaaaccagaattaaactcatttatatttataatacccctaagtactgaaaataaatactaacagcatttcttattcagaaaacaaaactggttgcaagcagcaagagaaaatatcttgctgagtgtcgctttgaaagccaaatgagttgtaaaaaaaaagtaaaagttcctagtttttgttttacaataaagtttctaattttgtctttagttttaactgatcatagaaattaataagcctgtctgtctcagagagagatatttgttctgccttcactattctgcctgaagcaggattctggaatgttcttcagaatcatgcagaatgagttgtaattatttgctacagaatgagttgcaatatttgctagtcttcaaattcattctcattattcaagattatatgatcagaatgaatggaaactgcgatggctataacctagagaagtaataagacaaaaagcattatttactcatatgaagggtttatcattcatatttcttcatcatctacctttctagattcatttcacgacactctccctcaggtcttccttctttatccactcacatcatttttcagtttttcaggcctttaggacctccacatctgaggcttcatgtgcctgatttttttccaactacctaacacatctttcgtatcataacttaaatgtcatttcctcagagaggccttccctgagtgatcattaaatgttttgacacattattttatctcatggtattctgctgtgttctttccagtacttgtcacagtttctgtttcttcgttttcttcaccactgtcaccacagtgcctacttcatttccaacacggtgtaggtactcaatacagattgaaggaatgaaggatagataatgcactcatcttgagctacatcctatttagtgagcaccataaaacttggcaggcattgttagacctttatatggacaagagctttgatggttcgtttttgttttgttcagttttgttttctttctggagatggaaaaagaaatttaatagtgataaagccagagaaacttaagctggacctgtcaatctggtatggttgagaggtatttattttaatcagctgtggattgtattttcatgtgacattttaaaaaggatgaaaagggtcttacagccacatgcatcattcttttgcctgctgatccataattagaatcagcatctagaatctgtttttgtatataactgaagtatcagagttacaagtaaaaccactttccacgttatttgttgtccattaactgctgaagattagcatatttaaaagttttactgagaagcacataattggaacctgatgtttgttatttatcctgattcatgttatattttcttcttagtggacattaaaatttcaaaattgctataacagaggtgctgttggggtagtttcttagttgtatatgggtcgtatattgtatatgggaatctttttatggtacacatctgttttcatcaaataggtgagtagtattcgggcattaccttataccttctttaaagaattttcatccattgctttaataattatattatgccagctctatttaatataattaaatttttttttaaaatttcctgttgtatcaacctgaaactactttgactagcattttggctgcaaccttcttttcttaactgttcagtatccctctgtgtatttttatttggttcccttaattggaaataatttaaaaaacataatgtgtgactttcttgcttactcttgaataacatttaaacttcagcctcacttgtctaatttcagttctgaggtatgttctacttgttgcctcctcaaattgctttgccttcctgaaaagtttttcttttgattctacatattttcaggggagggataaagatctaagcataaatatcacctccttagatgggtcttttttgaccatcctatcaaataggttgtcacagttagtattgtgaatattttctgatgatttattttctcccccaacaaattttaactgtctttcaaagtataattgaagttctcattcttgaagcattttctgaataatcaagtgctagaacttgagcattttttagcttttactttttgtcagaacattgtagttggtggtgtagagacagttctatcttgatgcttcaggttctcatttctacttgagggaagctcacaattttcaggaatcacggaggatggcatttgagcccgcctggcggtctgagcccacctggagatccccatcctttcaatggggaaatgtatttgagctattccccaagctaatgctcaggtaggagatacaggcaggaaaagatgtcatggaagatattttaaaggaatgggagtatacgcctagcttagaatacaatatgtgaaagcatattgtattgtggttctttggtgctggatatctcaggagtggaggaattgaaggattgtgttttcatttttacactttttctcttctgctcttctgatttttcaaccatgaacatggttatgtgtatggtctggtttgggggaagtatatatcagaaaaaataaaacaagaaaggaagttactctggttaccatgcaatttcgtatttaaatgacaaggttttgcattttggatatttcatgtcagccgtgtctcctcagctaagttctagtcacttagaagtttggtgtcactgaattataattttggtgcttcccatgttttatatttacactagactacatgctatatggacaatgtgcaatcagttaatatctgaatgaatgaattgaccaacttttgagaacagagtttgacataaatttggtggtttttggttcattgtgctttaattgaaggagaagtagacattgtacttcacattaggctactctttagataagctttccattacatggcatgtgtcttactttcttacttgataatggctctgtttctgaaattatataaacagatttttactgtttttaaactttacaacttaatattagactgtaaattatttacttatttattggaaacaaacttttagatacagaaattggtcttttaagacaacaacaaaaaatacctagtttttaatctggctcctgtctttcatgactaagtctgactgatctttcttgttatatgatgctttataagattgattctgtatccgggttaccaacgcttcctgtaacagaagaaaaacattcagatccttatagtgctgagtcaggggaaattattacatacaacaaaggaaaagtctttgataggaaatattgcttctggtaggaaattaagtacagagtacaaggatctaaatgtctgtcatataaacaatgggcaatcttattaggcaattttggacacctattacgtggctttatttatttattaatagtaggcttttctcatcatggttcatggggatttgtaaggtaacgataccctggacagccttccaagatgttttgatgttggcagcaatgcattactggggcaggggcaggggaggaggtagaaagtgtgataactctgcatcactccttcttctttgttctcatttataacacctaaggcattggaattccccagagtaagaattctagtgaaaagggaagcaaataaaatacatctgacagttgggatccttgggtttatacatgtgctgactaattacatatgaaatgagatatccccttaaattaaaactatttgaagataccacttcaaatatatgtaatagatgatttacacttcttatcatggctttcaatagcaagaatttctcttgcagtaggataattaactagaaatataaagaaatgtttcaaaagtataataatgtagaagaaaaatagaaaaatttgattttggaagaaatcttcctccattattatgaagatagctgcagtttggtttttttttttttttttttttttttttttttttttgggacggtcttgctgtgtcgctctggctatggtgtggtggcatgaacacagctcactgcagcctgtacttactaggttgagccatcctcctgcctcagtctccaagtaggctcccaagtaggtgggactacaggtacatgccactatgcctggctgatttttaaattttttgtagagacagggtctcgccatgttgcctaggctggtcttgaactcctgggctcaggcatttctcctgccttggcctcccaaagcgtcaagatcacaggcatgagtcaccacacccagctgatagctgcagttttgtgtgtgagagttgatcttcttgcctttactgtgacaaaacatctttatggaaagacaaacagtattcgttacgtttattttacctgtgtattcaagaatgtttatttttttcataagctacaaaaccagattagaaaagtaacttgtatttcctaaaaggaggcatattttaggagctatatgaactgggcatttttaattttttttcattactttggggaatatttcaggatctcatcagcattcattacatgggaggacaggggattaaaaaaacaaaattgattgttaatgaatttttttttttttgtatttaggaagaagaaagactgtaacttaaaaagaattgtggcaaattatatatgttaaatattctggtctagaaatgtggtatagaggttccctagaagcttctgttccactgtggttaaaatgttttctcaccttcttgaactgtctttgtaggtgatgtcatgaaatgtcccaagagaacgttgtataaaacttcctttgacctttctggactcagggctgagctccttagacctacagtttcttgttaaaatcgagtaggttgtgtttgaaaaataaagtttatttgtaaaattatttcagtttatattttatgtataatcatctctcttacaaatatatgactcaaggaaagatagtattttgccctagggtcaagagtgaaattatttaaacttattagtgcatatttatttcttttctattttatgctaaaaaaatgtgtggaactaaaatttgaaaagatacttattttgttagtttagaaaatgtttagtatttcatataatcttaactttcaagtattttggcgtctatcttaatattttctcctttaagaaaagacaaaaattaaaaatcttattctaacttagtttagtccactcagtgaaacagcatttaatatttaatgaaaattgttttgtcgtttcctttgacatctgtattaaagattgctaattgcctccaaaatccattttgtccctttcctatcattatatatttccccattgttatccatccatagtaaagatagcatttcctgggttcacatgttgctgatgtggccctgtgagcaagttttgatgaattggatgtgagtagaagtgagctgtgcagcttctagatcatgcccttaaagggaagccacatgcccgctcattcccctttttcctgctccctgctggctagaatgtgaacagggttatgagtcatctcaaccatgtgaaggagggtgatggaacagggatgggagaaggagcctaagtccttgacttctccatagactagagctgctttgcttaggcgagaaggaaataaacatcagcatcagatagtattattctgtcacacttagccaaaactgtgtataaaatacattaccatgctgacagaattcaccatttctgctgtgtttttttgaggtttaagtttcaaatttgcataatatgtgaaggcattttcatgtgaaataaaacattattaactatatcttgttttcagagcaaccactggattcatgctaatactgcttttatattacagttattcagtattaaaccattttgtgactatctgtaactgttagatgtatgacccatttgaggcgtaaacagagtgctgtctcttgataatctaaatttcctgtcttaaatttttgtgtctgctttgcctccctttctttgtcttcctccctcatgtctttccctcccctttctgcctttggctaatgtctgggccagtgctggtaaagtgctccctggccagtccatgggagtttaaggaccttaacagagaccaggttcctggcgttacttctgaacacacacacacacacatacacactggtaaaattcagttacttgcttggggagtttatgagtttatattgtaatggatggaaaaatgccctgtgctttgcaaccttttagactaagtaataacacttacaagaaattgtgagtgttatgggaaccaacttctgtgtgggagatgggtacgagggaaaaaaaaagtttcataatgatgaatgagaaattttcagaaagcattgtttggtttgtcattttcagtccagaaggttacttacgtcatttactctggggatggaatatagcttcactgaatgacagcatttggttccaagttatttagttatgtttcattgtgttgaaataccctacctttgccagaatcgttgtaaactatgtgtgaagctctaggtggggaaaaattgaaaggagcgccatattatattacaggaacaattcatgtcctactcttggtttcctttcaaagccctgtatttgtggctgtgctaataaattccatcacattcattatgcatagctgtaagtgtatgtaaataccacgcatcttgcattttgaagaaaaccagggagtgaacacacatagtctttcttgcctgggattcatttattttttaaaattcattttatatatgaatgagaaagttgagggaacatttcctttcataccaacatagaaaatcctctaataccacatcccctgtctcctggtcctgggagcagtaatgggattttctgggtgcatttgcatcatgtgtatcattgcttttctgtttatgttcagaagccttttctgccaaggcttccacaatcttctgaccccagcagcaggtacatccttgtagatgtcagtgtaagtctttatattatgaagagtatttgagagaatggtacaagaggatgaaagggtgaatggaagttgggggcaaaataatggagggctaaagaatatagatttgatcttacaaaagctgtcgagaaaccattgtgcattcttaagcagtgaagtggcaccatttaaaatgcacatgaatgattagtctaatatagtttgtctgacggcaaagactggagagtggagtaagaaatttgttggattttataccaaaaagctaaagtgtttctaggatagcatgtcttgtttaatattttatcttttttcaaaatggagatcatgttttatactgccttgttatatggttttattacttctttatgaatgacttaatagagcattttgtgtatgtggtaaatatttgtatgttcgtttctctgatcaagaagctaatggattattttgaagtatctactattttgtagcactacatgagttgtacaattaacttgagtccccataaacaaaattggggacatgctggatccatgtcatgctgtcatgctggagccgtgtcatgctggagccatttcaaactccagtgtgcttgacgttaaatttcaaaagtcaaggaaattgttgttaaggagcttagttgaagctatcttttcaagaatttaatctactaattcattttgtttaatttttaggaatttgtatgtcattaaaatactctcaaaaatgctgttctgatttgaaatgaaatacgagtataaaaattggggtcgatctttggtacattgtttattgtactggaaaatgaatgcttaacattagtctgtgatagtgatatcatgctattttgtattcaagcctttatatgttttcatcaggaagagtcaggcaaaagcagacaaaaatttcaactaatggcaaagcactttgtacctttaaaacaatttaatgaggagttgtttttactctaaaagctgaggcaagagatacatggcagtaaaatctgctattgttaatctactgtagtctcaaatttttattcattaatttatttattcatcagttccttcagtgatatttgttgagcgcctactctgtcctggcactgctgtagtcacagaggacaattatgagttactgagcctgactcctctcctatatggattagagagtgaacataaaatatcaggaaaactaaacagtttttacattttgctttgaatgtttttttactttcctctccgcttcctttccccccttctcttctttctctttccatcccaggtcctcctttttctcactatctgagagtcggaggaaacaaggagatgggaatttggagtggaagataggtttaaggagatagttatcccactctggttctaaattcttgcacaatatctgatatggcattagctgaagaaccatgacatgattgatttctttttttcatcccactagtatatgttacaggctctcagtgtgccaaccttgtttgagacacaaaggatttagtagtgaataacctagatgcagtcctcatggagcagacgctgtgatggagaaggtagaccacaaggaaatcagcatatacaaacatgctataatttcagttagtgataaatcctataaagaggaataatctaggataggaggagagaaaaggagagatgcctttatagtaacgctctaggtactcttctgattacactctaggattgtgtatatggctctctcatgtcctaacacttttgcaaagaatggggatatgtttcttttagtaggtctaagtctaaacaagagaaggtggaatgatgaggtctccttctcagtggctggagtgaagtggaagggtataggaggctcccctttcgtgaatgcccttgctgtctcatcagggacaccagatgaggctgagctgttagcttccctctccaaattgtcatttctgccaccttgaatcccacagttggcataaaaatcgtattttaagatgttattactataatttagttgtgaataggaatgggttatgtgataggcatcagggaagggcacaaagaagaaaggggcccagagtggggagattgcaattcgctaaagtcaggctgactctactccacagccctcctgacctaaggctgtgtttatgatattcagtcctcttacgtgacagaaatatgtggtacttggtttaggttccaggtgcatatttgttaactaaagttgccttgcttgggtggcaaaaaactagcctgtagtccattttacaagcataagcggtgaaggtgtttaagatttgactttgcatccatggtaacagtctccaccaatagtacatgttacagagccctttaggcctacaattgtactgtaaagacagactgtagtgacttgtctttcttatcaggaccccaccctacatggatccttgaagagtgagcaggactgcagaaggagctcaggtggatttgacagcttataaacctggagtttggggaatgctgaggcttcaggaagaaaacaccagtaagcttaagtttgggattcccactactcaggaggactgatgatggggaccaaagttaggaaagcagaggagttttggagaacctatgagttcaaaagggtgaagtaggaaaggtgagaatgtgagggagaaatgtcagagtttatttggattcttttaaagaataaaatagaacacagtggggagattcagagtcagcttggtagggttgagtttgagggcctaagaaggaagagagtgatggagacattataagaatggaagctcaagagaaccatgtaggtgctttgtaccctggtatggagaatttctgggtgcagagttcatggaccctggcgagtaagagctcaacacaagagattagttgctacttgaaataaacatgataattgtggcccagacagaaaagcctcctctttttcaaaggtcaagattgctgaggtacatgactcagaccttgcatagcagtaggaagagtaaccagcagcaaagcaataagttgtttatcaaagggtgctggtgactcagtcaggaggatttggaatagaatgattgatttggaagtaggttaagctaaccaaataatatgaatctcctatgtgtttcttaaactgattattttgaactcaagattctcttctagtgttgtgaaaatagtttgtgatatgaaaatgtatatgctcaattgctgtgaccactaagggagacaggtatagcaagagaaataatggttcagtctggaggggaagccatcccttctcgcccttcccctacgttgtgtggatggaaggtctccaagagaagcatctatgagattaggccagggagccttctgtttcagggccaccccattctgtgtggttttatttgtcagagacgctgatcctaacagaaacagctgtttcagtgaagttcaagcttgccatctattttcagtagaagcaggaagaatgtcagagacaatgtttgcattttagggcctttttataggagcctaagataaagctgtttaaaccttctgtcctctgtcatttaacttatcaaattcaagcagagccttttaatttcaacacacttaacttctagggatgaatagggcattgaacggattctataaacaagtacttttctgagcgataaacaggaacaaaagcagcacaaagatagcatgtcaacaaggtagggtgtattgtgagaagggcaaggcttgagagcctaatctatgctattctggggaagcaactatgtttgtttgtttgatttaaggagcagtgaagttacagagagcagaaaatgctgatgtacctgaaggccattattcacttctgtagacagtgctactgggtgagaagtgaataatattagtaatatatgttcattaattaaatgtagcttttaaaagaaaacacaagatggaaaagtgaaacaaaatggatagagttgtttgggtactaagagtagtagagtagattgaagaccatttaaatgggaggcagattttcccatgcatatctaaaaaggtcctagtgttatcccttcactccattttagatttgtttgtttagtttggccctgagtatgctagaacagataataacctcccagcaaatgtaactgagtgggaacattattttagttcactttcaaaagaagagggagatccaattcataatacccaaaatagagagtaccggttagttccagaattgaccagccatggaaagacatagaaactttgcctgttagaatgctcatcctgagaataggacctgagcttttagaggtgttagatgactagaaggccttagaaccattaaggcattttatttctttcacattcagccagctttccttgagcagcttttctatgcctcttgcatttataaatacttaaacatgttatcccattcaaaagtgtaatttgttgatacattggttcaacactgccattgtatatgtgtgtgtgtgcaccatatatgttcatattatagttgcagatgaataaaagataatgataaataataatataagttatttataatagtgtcaattggttaaataacttatacatccatatgatgaaacatttccatttttaaatataatgagccacatttatatgtgctggtatggaacaagcaaaaaaaatgttaagatgcagaaagatgtgtttagtatcataacattgaggcaagcagagatacacacagatgcagacttcacatctctgttcatttatatttgaactatgagaagaagtgagaagggatgaaatcatgaccttgaaaataagaagctgtttcttcctctgaggtaggagggaaaagaagttgggtaaagatatgaaatggtgaaacattagttgaggaagaaaggacaaatcagtgagcaaaaatcctgtttttgtttttataaacatttcaatcccgggcaatcttgagaaagccagggtcataggttggatgattgcagtactttcttgtgtgttcaaagaggaaagtccaaatgcgcatttggcactggcacttctgaaaagccctgacctttgtaatcaggttctttttctacctgccctgcaaagatttctttttgttttgttttggcagtagtgtttatgtgaacctgtacccttactgtgaaattttaacttactgtatagactggtttgtgtgatgggctcctacctattttaggactagaaaggactgattagatcatttgctctggcagttggcttttaggaaggtgaatgtgtaagcctttgaactgttcggcattgaaagatttatggatctcttaggcagttatatcaccatttgaatagtaggtgatagatagatagatagatagatagatagatatagatatagatatctgatctttaaaggaccaggattgtagaataatgttagctaggtatgtaaattatgttgtgtttggatgtattttgtttttggatgtaagggacagaacaagtacatggatcaattttcttcatcctataaatttggtaaaacagaaacaatatgatgtttatttcttattttgtatttgtataaaaaatgtaagtgttggggatcattgtctcttatggtacctcacaacccatcactttatatcctaccttcaatgatataggtaaaaggtatattttttaaaccagattttacaaatttccattaaaatgttgaatttttagtttttataaaactaaaattttgagtaaagaacaaaaaggaacagaaaatagtgaagaaacagaaatagagaacgaacttcctaggactttttaagcaaaatgaatattcaggctaatagttctatttatttcctagaagtagtacacagtctagtttttcttttatacattttcttgattttagggtataaaattaaaaaaaattctgaagaatttctttctgtgctctttgaggttttgcatttttatctggtgtttgtgtaaaattaattcaacttaattatgggaggggtttaaaacaaatgatactctttctaagctgggacaagttattttccttagtcactataggaacaaagaaggaatgagtggcagagtagaattgcttttgttgagcatgagctctgatatcttggctgtactgttcatttacacattacaaatattttcttagattctaagtaaatgttaccccctgcccccgaaccttgcttctactattttaaattctttctgctagctgcttctttctgaaccctaacacaggggtccttaacccctgggccacagaccgataccgatatcaggaactggacgtacagcatgaagcaagtggtgggcgaatgaaggcagcttcatctgtattgacagctgcccccacattgctcacatgaccacctgggctccgcctcctgtcagctcagtggtggcattagattctcataggagtgtgaaccctattgtgaactgtgcatgtgagggatctaggttgtgctgtccttaagagaatctagtgcctgatgatctgtcactgtgtcccatcacccccagatgggaccatctagtttcaggaaaacaagttcagggttcccactgattctacattatggtaagttgtataattatttcattatatattacaatgtaataataatagaaatcaagtgcacaataaatgtagtgcacttggatcatcctgaaaccatccccatgcccctggtccatggaaaaattgtcttccatgaaaccggtctctggtgccaaaatagttggggactgctgccctaacacatgtagggtaagtgggatttcacatacaggtataaagataacattttcattttaggaatatatttttccatataataataggaaaattgtgtatcaatgaagttttggaatggtttgagactctctatgtaagacagtgagtccaactgaaaggaagcatggtgtccgttgaatgaattttgcttcttatcaattcctgcaaagttctgatgatatcacatttgtagaaatgagagcaaagatacaaacaaacaaaacaaaacaacaaaatactacttgtcacttttgaggagaaattgaattgtttctatacatcttactttcccttcattatggtttttctttctttctttttttttttttgagaggtggagtcttgctctgttgcccaggctggagttcagtggcacaatctcagctcactgcaacttcctcctcctgggttcaagtgattctcctgcctcagcctcctgagtagctgagactataggcatgtgccaccacgcctggctaattttcgcatttttattggagacagggtcttacagtgttggccaggctggtctcgaactccttgcctcaggggatccaccccccttggcctcccaaagtgctgggattacaggcgtgagccactgcacccggcctcattatgtgttttgatgaatctgttaatttatgctccaacttaaatattcatatttacttttctcttcaagtgttttcaccattgttgactatatttaactgatatatgaagctagatttaagttatatctaacattttgcaaagtatgcttgaagcagaatggagttattgtataactatacataagcagaagttctatttgcagattcacagatgcaattatgaagttaagtcagggatagttgagttgaaacaaactttttcactatagttttgcttcctcatgtagccattttatttttttttacaaattaatctaaatctctagactttcatttttctatatcctatattcataaattactaaaggttttaaagtaatagaataggttaaaatagctgcatactcttcttagaattttgcataaaactaatcttcacaatctatttttctgaacatctgtatgcttttcgtatttaatttattgtttaaagaatttttgcggtttctcttgtgtttagagttacgtaaacagcatttgcattagattcagtggtaatatacagttgcattataatatacttactataaaaagtaaaaattattcatgatttttttgctggtaagtttgagtttttaacgtaaattaagttgccttaatttcataaatttcagtgcaatttcttagcatttttattgaagtgaagaagctatgtagtcattgtgccttatttttaaattgctctggtactttcagtagggaatattattaacatgaaccccatttcattactttttaaatgtccttctagttgccctaaatgtattgtaagtacctggagattttatgtctcaagccttctttttatcagtgtggatgtataatctccataaatgtcaattggtaatgatgatgagccattaaaattaatagcttatttgctaaatttgatgcttttaagtctaggattcgattttacatgattagacctataaatacattttattattacaaatttatttgtgtccattctttggaataatcattctgagaagtttctttgggataagttttcattaattttgatgaaatttgtggtgtttttgaaacagccactttaatattattgtgacatatttaaaggaaagcacatggatttctggaaaccagaattttaaacaagataatataattacatcttttgggaaaaaaattgtttattttcactagtgtgttttattccaggaagcaagtttcatcatcatgatttaaaataataaattgaaagacataaaacttaataatgcaaattagcttttgttggttgtgatgatgtactttgctttacgtgtatttatataacacctcggatacccaaaatatttattaaataccagcatctttctcacattaacctgaaaacttacagtagtcacttttctgcttgcctttattgccagactagtggcatacacaactgtcttttcttacaactaatgccttcagttatttcttagatatgagctttggtatgttacagttttcagaacttgctcaagtaaggcctcattcggcctcattgttcaactcagtggcttgggctctgttgcatctcccgatagttttttagaatattcactactctagttttcagtgacatcgtctgtcttggttcttctgaactacttaatgtgcattcctcttgtagggttctcatcctcctaaatgccggtattctccaaggctgcttcttttagtgtcctcaagcttcaagtcacccatggctactcatccttttcttctatttaccatcttcagttagtcccaagtcctagaatctcctctcccttaaaaataatctttgctgctcctccttgtcccctgttcttgcaactgtgttatttcatccttcccttactcatgataagattactgataatggctggccttctaatatcttgctccccaatgtgctaaagctagagaagtctttaacactttaatcctcttctgggcatttgcttttcttgcaaaagattaattatcttctttttaatctggtttattttacatatgccgtcttatttctcactactacggacttgtcttcttctcattttcatgccttcataattctaaaaacatgtcatgctaattctcccactcatctggaatcctacacacccagttcctgtcccagctcttccataagcctttagaccttgctgatttctccttttgctgaacctgtcttcacttttaatagcatgcatactgatgtatatatatcaaaaacccttttttttttaaacattacttagaattgtggtggagttgtcactaaagattaaaagtaggttccattaataagagaccatatactttttggtatccaccgcagcagtgctgggcccatattttggtgctcagtaaagttgatgattgatttaattgattaaataggtgatacttcaactttcaaatagagactttgtttttaaaaagtacttagctttatattagttgaacagctgtgtacatgaacatgtaaagtagaacttactttatgcactatttactcctgtagttctaaaaatactgcattttgcttctctttttttgtaaactactttctggagtgcttttattatttaaaaatgtacttcttatcatagggattagtgagaagtatttatgagagttctgttaatgtacctgtaaccttaggtatacccaggagcttaacattgcaaaaatcaagcttttgaagaaagaatagcttaagtgctaaatttgaaattgcctgcttagtagttttctaaatggtttagaaaaaattagttgacacgtttgtttcaagtgattttggagcagccaatttgttcgttttttaaaattaataagggcagtcaatttactaatttttactaatttcatggttttgcaaagagaaaaacaagatcagatgacatcatgcaattttttttttcttttttaaaaaatatactaagttctgggatacatgttcagaatgtgcaggtttgttacataggtatgcatgtgccatgatggttaactgcacccatcaacccatcatctacattagatatttctcctaatgctatccctccccttgccccctacctcccgacaggccccagtgtgtgatgttcccctccctgtgcccatatgttctcattgttcaactcccacttatgagcgagaacatgcggtatttggttttttgcttttctcttcctgtgttagtttgctgagaatgatggtttccagcttcacccatgtccctgcaaaggacatgaactcattcttttttatggctgcatagtattccatggtgtatatgtgccacattttctttatctagtctaacattgatgggcatttgggttggttccaagtctttgccattgtgaatagtgctgcaataaacatgtgtgcatgtgtctttatagtagaatgatttataatcctttgggtatatacccagtaatgggattatggggtcaaatggtatttctggttctatatccttgaggaatcgccacactgtcttccacaatggctgaactaattcacactcccaccaacagtgtgtaagcattcctatttttccacatcgtctccagcatctgttttttcctgactttttagtgatcaccattctaactggcgtgagatggtatgtcattgtggttttgatttgcatttctctaatggccagtgatacatcatgaaatttctttcagtttcattggaactgatagaaattgtcattgatattccattgtaatataaagccattaacagcctttcttcctgtgttttttgctaatcatcctttgaacagaacggatgcttttgtctttcctttcactactacattctaaaagaacaaagatatttttatcattcattcaataaagagtaggtacctacaggtgtacaaagcattttttgtagatttaaatctcaatctgcactgaaggagttcttaaattagggcaataatgtaggtttacaaaagacagtatgattttgcatgaaaatgcactgggaagtgctttcatagatgtataaacacattctgaagagagagaatttcttatgcctgacagggctaattacagataattttgtgaaggagctagcatttgaattcatcttcggaagcagttgggatattagtggctaaggatggaagtggagagactgtactgtgtgagacacaggggcaggagatacagggtgtgtggcattagagggtggggggtgggtacaaaatttggctctggagataagtgggaccatatctgggaggtgactgaatcttagactatggattttcttctcatattcattggacatgagggataattgaagagaattttcatgaccagaggtgtgtttatgaaaatttgtcagcactgttgagtataaattggagcatcatgaaattggtaatgaggacggtcctaaacaagacgttgtagtagtataagtaagaaataattgaagcctaaactgaagataatggcagtaggaatggcagtaggcaaaagaaggaatggacacaagagtgatttcaagagactcagcataacttgctgccatattcatttatatttccatgaatcctttttgtcattccttaagtacatattgtacatgtacgctattttccttcaatatattcagtggtggaagttaattgattaaacaattttagttttgtagcatcaaagtctgtttactcttgtgacaaataactgagttcaggtttgttacagaatttaaaagagttaaatataccatttgcataaacaaaacaaaagggaatcaacagtctcagtaatactgattaatgatttaggtatattgataaatcctcttatctgggttctatgttgttagttttattttccgtcacattttgtttttcttatctctgatgcacgtataaacataaagcacacaaaagctttagttgggagaatttaattctttctgaaattctattcggattttgagtctcactctttgatttctcaagttctgagtcatgagtgtttgggcataaaaacctgatgatctttttttaaattttcattagaaagaattaaacaagcaaacaatcagaattgcttaattgaactacatttgaaaccaaattatagaggtagttataattttatcaactttttctgtcctacgatctttcttattagacaagtctgataggctttgtaagcagtatatatgacaggttttcattgaaatgctgccagtgttgaagaggagaaaagctgattttccagaagtgagaaagacaaggaaacagtcacaattttttaagattagttgaggaataccacacttggcttcttgttattgaagttttttggtgtaggtctaacaataaaaatcttgtaatattggttccatatgtatagctgcttacttgtttcatgtaatactttcatcacaaaaaatatatatctaatatttctgtgataaattataaatacagtattggttttggtccttggaggaataaccttacaaacctttaaagacttttaattttaatttttattttctttccagctttattgaagtataattgacaactgaaagactagttggtaattgaaattaggactcatttttatagtcagacaatgttaatatttaggaggagaaatgatgatttattaataactttactcaaaataccattgcataaaaattatacatataataaagtgattaaggggcacccactttttatttactaataacttagaatattcagtaactattgtttgtaaaatgaattttcttttatccccatgtctgtcattctccattcttaaaatattttcctctgtgaaacaagccagcagggataagccccatgttttgtttgatctagttaatttgacttccttctgtttgcaatgtgttattataaggtgaaatattttctggagttgtttcttaatcattttattactcttccttcttgtagggaaatggcgtgccattgtttccttcttttgtttgctaagttacctgaattttatctaagccatagtttaggtgggttagctttaatagtatttgaaatactgcttttgaattaacatactgcttgtttactttatcctttaaaatgtactttaccatttaattcttttagtagcactgagacataaatagggctgaggatgattttatttacatttcctagataagaaaattgatagactatcagtttaagtaacggcctaagatgactaagttgaaatgagaaattaggactgacattaagatattgattttatttcaaacagcattcaagaagaaggttagtagttattttagataaaattaatatagaaataggaagcacaaagaataagcaccccacatttctgatagataccacatctaaatatcacctataagatcttcctgagtctagcccttcttacttttgtatcttcatctcacagggtttcccttgtttctttgctgcatccatgctgactcttttttccagtccctttgcaattgctctgcctccttttaaaacaaaacttttgcccttgctcatttctacttggagctgtcatttcttcctcttagcatcaataactccattttgctgtttagatcgtatcttcctcagaaaagatgttccagacttcactaagtcaaattcctttgcatagctcttggcacagttgtggtgttacttttgtgtgcatgttagttttattccttcctttatcccactgatctgagtttacagatcagtgggatgtgactggtctgtttttattcattcttgtgccctaggtgactaatagcatagccattgagacatagtaggtgctcagtaaatatttgttggatgagtgtttaggtttaagaaagtatctttgcaaacatttgcagcattatcttttaatatttatagctagccagtcatatatgccaatttctgcatctacctatttgtcctctttaactgtatatgccattagcagcaaagcagtaatatggatattactggcaggtttaagtcattgacaggtaagttaaaacaacaaacaaacaagaagggaagggagaccaagtatttaaaaaaacaaaacaaaaaaaaaggaaatggggccaggtgcggtggctcatgcctgtaatcctagcactttgggagggcaaggtggcagatcacctgagatcaggagttcaagaccagcctggtcaacatggtgaaacctcgtctctactaaaaatacaaaaattagccagtggcaggcgcctgtaatcccagctacttgggaggctgaggcagaagaatcacttgaacctgggaggtggaggttgctgtgagccgggttcgtgccgttgcactccagcccggagaacaagagtgaaactccgtctcaaaaaaaaaaaaggaagtaattttcgtagggttgtagaattacagaacttgatggaatactggggtttatctagggaaatctgtctgtctctcttttaaagctttttattttgaaactttacccagtttgcctcagtgttaacgtctgtagcacaatatcaatagtaggaaattgacattactgtcatccacagagctcattcatatttctctagttatgcatgcattgatttgagagtgtatgtgtgtgtgtaggccagtcatttttaagataatagaagtttataaacttgtttccgtgacttactcaaagccaccaggccatgaggtgaaataattggtttttaaactctatattgctgtctgcccaacagccatgaattctgtcataaaattctacagatatcagggattgttcattagcattagtgccagatttagactaatcctacaatattgaaagatactaactataccttttagctaactgtgtttataatgactcaaaaaatttagttctatcaacttggatctatgtcaaaaattagaattaaaatcctacttttgtttttgcccagcaggacttctctactattcagggaaaggcctaattaaggtttcctgaaaaatactctttaatcacttggattagaataaaaaagaaatgcttttaatcacatacatatctgctaatgcttttcttctagtatctaatggctttgataataaaaagtagtaataaaactggagaactaatggattttaaacatgtttctatactgtacatattataaaatatgtatacttagtgcattaagtagtatcttaaacttatacctatgaagtacttacggtctaaaattgatcaggaggcaaccttacttagtatttcctggaagtagcaggcatttactcctaacaagaagtacaaagaaattaatatagagtttgattcagcgttggagtctgatttttaaaaatcaaactaatttctgtcttgcaaataattatatgtaatatttcctactttttataattatagaaacatgacagaactataaattattttctgaatctatggaatattattgatttggtcagtaagttatctatcattggacataaacagaagagtatataggtttcctttgattttttattttgaggtttagaattaaagtcttatgaagtttagctatttcttcgctaaatgctttaagttatacccgtgcaaaaacctctgatttgtttttgtaatttcactaaaataggctagttggtgagctgtggtgtatgtcttaggaatttaaaataaaaataaatattaaactgcttaagtgaatctggttcacacacacaaaaaatccaggtattttaattttttaccaggacatttttttaaaaagattttgggccaagaaacttattttagtaacagcatgctatagtaaatgcaattggaaatgtaagtaattaattttattgaataaaataagagcaaaacatttcccaatagaaaatctctttgaattggcactatttccagcccaattgatttttaaacaggtataaattcatagcagaaccagcttaacttaatttgtagagctcctatcaagcaggtctcagggtgtacacgttctgtctttggtggaagtgttagtttatatttcatcttgaagccagtggacattttaaagtttctttttttcttctgatgtttacaaatatgtttctttagtaattttaggcttgctagtttgctatgctagcttatattttgttattagggagtgctgattccctgtttctaaatgtcccatctttttttctcactgaatttcttcacttcagaaacatgataatgggacattaaaatcacatatgtagtttaccattgctttattgttattataggtattattaaacagtgtacatgacctttcccccatctgatccctcgtctgtttgagaaagtagataaccaaccaggatttgtaaaggaaaacaataagaacagtgtttggcagcttgctggggcagcttggggtttatacatatttctttctctcagactttgagtttatgactccaccaatcataaaaaagagtaagcataaagcagatcttttagtagatattctgggattaaaaacaaatccaagatggtaatgaggttattgttttgcttgtgattcttggtagactgtatgtatgtttaaaaaataagtctcaaggtgctgtttgtagactcatgagtggctggctctgtgatgggagcatctactgagctggtagtatagcctcctgctaatcatctgccagcttctaagctgctcaaggagttaaatgactgttgatacaatttttaaggagtggaattccgttcttgtcattcagtctatgttaataatctcctatgatgaaactcaagtgttgggtatgtttgtttcctgagctcctcatagacagaatatgtgtttatatacataatactttttaaactacttctgatgttattataacaaggttgagtataataaaaccaaagttatgttttaagatttgctttatgtgtgtatttgtctgcttctatctgtttctccgttgcattggtttatccagatatctttctatacattcactgctgtgtcactgttgcccagatgggtgcgtgcaggtagctgaactcaataaatatgagctaagtgaatgaatgaatgttcctaaatggtgggttattttgtcttttgagcagctgacagtgattctgatcttacaatctaaaagctacaattaagttaaataatacatagttttaggaatttttcttaatttattttcagtgctcctatttttgaatatactcttgcatttttcctaaagtgatatttaaaaactgttacaggaaagcatttttatcagttatttctataactggtttctataaatcaaccaaataaacaatgaatacttatttttttgaaatatatgcaatgaataatacctattaatgctattctcttcttcagtgtactttaacctgaatgcatatttctgttggtggctcaaatagtgagatttaagtcatagattttgttatctacaaggaacagttattatatgtttaccatttgcaaaacaaaagaaatatgaaatatgactcctgccttcaagaaacttaagaatatagttggataaatatagtgtaatgacataagacagcttagtatacagcatgaaactggcataaagtttatattatgaaaacacagatcttgtcctgatggaatttcaggtgaatgagtacttggacaacttacctgtaaaataaagactacaaaacaaatacacagacaggtccttagagaaacacatattactaaagatgtgggacaggaatagtttaaagatcttttataagtttttgtattaagctaaagatttttaaaaataaattttcttctttaaagtttgtaggtattttaagaaaacatcattttatatgaaaaatggctttgtagaaggttggaaagttaacttaatattttcttttaaaatttatatggaagatacttttcatcttggttttataaggctcagttgaagacaagtgttagcactgaagcttaaatagttaagctggccaaacagccaaaggatgaagaatattttttaggaaaagttctgtgaacttaggttccttattggtggcttgttttctaattttataacatagagtggttacatatttgttacctacacaatgatagtgtaatgactgagcactcactgacgcatcaagggatcccaattctagtcttgattctatttccaactagttgtatcatgcaagtcctctgagttcctttacttatctaataattcatggagttacaccacagtatgtctaaggtcctttccagctctatgctgatatatacgattctacttcaaaagaagttattccgaataacctttgcacaaactcacagtatagtcttgagaaggatctcagttttgttttgcttttttttctttaaagcaaataaggacttttaaaaataaattctcattatgttttgtgccatatataattacatatataattataaaatgtatataaaaatgtatgattatatccaactatgatgaaattatgtttttccattaaattatatgtgtttctctgaacataggattttacttcacaaataagactatgtattgaactgttaaaagggctcactggacacataccagattctcaggattcttttcaagattatattgctagttagtgcaataatatcactggtaatgcagaatatctctacctacgaggtctggacatgttgcccaacctgttcacgaacgcctgggctcaggtgatcctcccatcttggcctccagaaatgctgggattacaggtgtgagtcactgtgtccggccatatcacagttttttgaggaaaagtagaatctttaagaaaataagtgactaatctttctcaaaaatttaatctggtaaaatttatttaggtgacatttgaatgtattagcagaaatttacttgaaaagttaaagtttcctttcatataatggtattctattggatgtatgtatgatgtactgttcaacgtactaattgacttaaatgtttagtttggtgttactcaaaattaacttattgctatagttagatagcggtgagtgggcctaaaagagcttgttcgtgtccctgtgcagctcaataacagtagtctagcaattcatatggttccatttttagttttgtaacaaaaatgaattgcttaaaaaatttttttaagttttggaagcaacaatgaatgttttacacaaatcagcctcaattaaatttctttaattctggtaaattaagatttagttttctaagtattccatattattgaccagtattttaacagttttcggatatttttgccatatctcctttttgtgcatttctatccatcaatttgccactgaaaattaaaagtaacctgttgcagggtagtatttcaatgaaaaaaaattaaaagtaacttggtatgacatgcctacttcccatggcatgtctgtgttctttgagttggttttcagccagctatttggcaaagcttactggggggttatgactcatcatatctttgtgacctttaaaaagaatatccacttgctgtaacagatagggatctcacacaatttctgttttttttttttttttgaggttttagtattaggtcacaaacccatataaatagttaccacttctatttttgttttgaagtggagttttatgaatatttgagaatatagacagcttcccattgaggattgtattcctcgtccagaggtttcatttcagtggtaaatacggttaagtttgttacaaggtatttacatgagtatgtacagaagtgtattcatttatgcattaattcaacacatactatatgtaatgacgtcttaaagtgagaattaaaaatctctctgaatttctgagtttttaaacccagaatcaatttcattcacattgttctttcttgagcaaaatgtcattttaaagtgagaattaaaaatcccactgaatttctgagtttttaaacccagaatcaatttcattcatcttgttctttctttagcaaacttttcttctgtagagttccccatatgtagaccatgggaggaataggcactgtgggaacatagtggtttatgtgactggcttcctatccttaagagtaatttttttctgttttttttttttttctttcccttttctccctccctctctttcattctttcattcttatttcttaagaatcatgcagtggagatacgtgaatataattcaaggtaataaaagaattaatgtcctactactgatggtggcaaagtggtatgcggcttcagagaatagagtgattaattccaatttcggggactggagatagtttcactaggagatgaatggattttgataaacacccatgtgagggaaggctcttgcagcctgaagccgtaagacatgtaaagggtttttaatgaacctggcagttgagggaataaaatatagtagtataagaatttgagtcatcggctgggtggggtggctcatgcctgtaatcccagcactttgcgaggccaaggcaggcagattgcttgaggctagcagtttgagaccagcctgggcaacatggcaaaaccccgtctctactaaacatacaaaaaattagctgagtgtgatggcacatgcctgtaatcccaactatttgggaagctgaggcacaggaatcgcttgaacctggaaggcagaggttgcagtgagctgagatcatgccactgggcatcccagcctgggtgacagggtgagactccctctcaaaaaaaaaaaaaaaaaattgggggccatatgttttgaggagagatgtaataagaaatgtggctgggattttctcgtttggcctggagagaatgaatgtcatgctcagaaatgcgaactttataaaaattagggtaccattggcatttatttcaggaggtaaatgaagtgatctgacctgtgctttagaaagatgatggtggcagagtatggaaaatgtgttaaaggtgatagattggaagcagtggaaccaataggtggccatgggctattgtttggataagtgatggtaagggcctgacctctcaaacagcaactactgtggtggtgggtatggaagttaccatgcagtgaagaagaggaactgataaatataatgttgcttactttttttagatggttggtatggagggtattagagatgggatactctcccactgtggagtaaggataaaggaaggctgttctactataggggaatatataaatgaattcaaggatccttaaagatccttgaaaataaagaggaggtaaaaactaaagagaaatagaaacaaagaatggatataacagatgttgggagctggtgaactttaaggacaacagtatccaacagaagtatcatgtaagtacaggtaattttaaattatctagtagctatgttaatattaacataaaaataagcaaatataatgaattttaacaatctattttatgtaacctaaaatatttaaaatattatgtcaggatgtattcattataacaaattcttaatgagatattttacatttttttttttttgagacagagtcttgctctgtcacccaggctggagtgcagtggagcgatcttggctcactgcaacctccacctcccaggttcaggcgattctcacaccctagcctccctagtagctaagatcacaggcgcctgccaccacgcctggccagtttttttgtatttttggtagagacggtgtttcaccatcttgcccaggttggtcttgaactcctggccttgtgatccacccgcctcagcctcccaaagtgctgggaccacaggcatgagccaccacgcccggctttacatttttttaaactatttgaaattcagtgtgtatccgcatttatagcctatttcaatttagagcaaccacatttgaagtgcagagtagcacacatcctgagtgaccaccatttgggcatttgagatttaagaagtcaactttttaaagtcctctatgatttttatgtgtatattaaaaatgttgaagctaggcagtttaagtgtgcagtcagagtgccatgtgagaactaacttcataaagttgtagcctaagagaaaagcacacagactcctgagtgaacagaagaaacttactctcgacattaccctaaaaatcactcctgtaattgagtgtcttgttattttcatgaactgtttccagttgacagtattattaagtcagcaatgtatttttgaggggaaaatgtaacttaaaaattatagtgaaaagataagtgaccccttcaagtagtataacaaatttaagttcattctattatctttaagaatgtgtacccggctttattaactttgttatattaatcaacttccaaattattttgattttctactaagaatggactgtctccttactcccacccccagttagaattttggaacaaataattaaaactattacttcatagatttcgaggatagagagtggggctcaagtgagccacaactccctgtgccttacctgactttcgacttgagaatggtggaagttataaacattgctttgagttaggcttctttttactgacttttgaatcatgaggaggtaggtggtccactccatgaaaatgaactctgaacgtctttatgctacccttgacactttgaaaggagccgtatttaataggaaatagcacttacggaggagaatctgagacatgcaagccgccatacaaagataaatcaacaggggcttgaaaaataaattgcaggcctcataaattcacagcctctcttctaaaatactaagcctaaagaaataagtagaagttccataattattctacaaattgtgtattctgaatctcttgggtaattatcacaactaaaaattacgtattacaataatcacaaccagcaaattacctgaaattgcttgctcagtgaatatctttcagtaaccaaaatttgtacataaaatgactatgcatgagtgctatttataatgagcacttgttaatattggctgtgtaaagacttctccgatttctctaatttaattttcatcaacactacgggtttaaatagtacctgcttcagtatctaagcaaaggggttttatttttagaataaagcagttaaattacactggtgtaatggaacactgtatcaaaatatatacatatatgtgtataaattctaagaaaatactatttaattcatatgttaatccctttgctaacttcattacaattttttccattaaatgaaaattaagtgtcttctaaatgttttatggagttcaaattaagtagttgaatccactgatgactataaaatgtgtgagctgcttcaatagttgtatcctgaagtacagattgaaggtgtgtctagatggagccagctgtacatcttcctcttctaagcttctctcccaaaacataggggcaagtaaatgatttttataggtagatgcttttaggatttgaatatttttgtcatgtattggtgttagctgtgggtccgttacaaatcccgtgggaccttcattggtgtgaacattagtgtatgggacttccagtctgatctttggcacccatgcaactttctcttatgtttttagttggcaactctggagaatactggttcctaagctcttttggctcacagatacctttaagagtctaatggtgacctagggattctctttaccggagagatgtacataagcatgtgagcgattttgcataaggccaaggaggaattagtgagactaagaagcaaactgggaactgttccagctggagaggacactggtgtctgcctgtttaggtaactgcaaatcttatgcatgaaagctacagtaaggaaagaggctaggggcaggggccgagtaatgaagaaaagaatctgacatccaggatgctgcaggtatctttggatgtatgagtttctccctggggtatttcagatttatttcatgttagtggcttgcttgtgagatttttcttgaaggttattacagtgattcagtgagttattgttggctaattgatgtttttatcatttctggtttaaatgtatatatactttcattcacgcatttgaacaaggctgttctcagtcccttttagaatccaggcaacttcctcatctttccccaccatcctgtggatctttcaggatttttccaaggttacagctcaaagtgtcgtgttgacaggctggagcttgtcaccatttctaaagtatgtttttgaatgaattcaatatccttgattcttatcccaaggagttttaacacactttttgtcattgttgttgttgttagcagtaggctagcttagaattgtaacttgcccatgccaaagcaacaacaacagattgcaaaggaatcttcaaaatgggcggtgggcaaggcccagcctgttttaggaagtcccctagctgtttgctgtaccacagtgaagaagaaagtgaagaagaccatttcatgtaaatgaatgcagtgatgtgggtaagcacatcaaagttcttcgtaaaatgaaaaaattgttcagacctgtcttaatggttaatgcttacttaaaagtctaaatgactaatttgactagccatttgttagaggattactcattttaacttttgagttccttatacttaaagtagctaaacacattttaaataatctgtaatacattaaaatattaaaaatatgcttttctcattaaaaatactatcttttaccacttttataagtagggtattttacacagtgattaagtatcattttagtttcctctacctaggttttataagctattaaagttatagaccatttatctgttaataatggctgctgctgctttttatgctattttcctgagtgcgttaaaggttatttttattaattagccaatatttcagcccacagtaagggtaaatcctctctaaaaaatttggttttcagcctgctcaactcacaagcgattaagaaaaaaacagttgtgagaattcattagtgaaatatttaagaaacatgttttaagtctcttcccgagatttttttttttaaagcatgctgagatagccttctctcactttctccctcttactttcacatgacatataagccaaatggatcagttctttttgacaaagtgtgcattgtactgtcataatttgttttcatgtttattatctaaattcgatttgtgtagcagtttggtaaaacccagattatatgtatgtcttttcactttgttccttctttcttcctgtggtaatttactataattgtattttcccagtaagtcagatcatattagagacattattccttaattatcagtaggtgtccttggaatattgcttagctcacaggaagtgggtgggggggtttgtgtatattttgttttcctagaaatttttatgtaattctaggttattgtcaacaacctgcttgtaaccagacaaaaccttgctatttcaataagtctaaggctagttgttctgtcaaacacgtgtcttgacagtgagtctcagtcatggtgatgcatcagaaatcatctggcgagctcttaaagcaataccagtgctttggtaccgctaaggctgtgattgaattgagccaggatgggccctggtaatggtaggctctacaagttcctcagatgattccgatatgcagctcaccttgggattcgttgtgtgttagaaggaactaggaagcatcctcctactcagtggttttcagccttggctcacattggaatcatctgggggaactgaactctctaatagccatgtcccttccccagagattttattgattctctgggatactggtctgcacatgcggatttaataaaatagccaggtgattgtaacatacaggtaggtttgaaaaccactgaccaccgcttctgtttttcagatgaggaatttgaggcccaaaccaaagagattaggtgacttgtccaagatccacagaaccacaactagaactcagatcttcagacttgttatcaaatgtttttaccaggacatcacatatttttaagaaaatgtgggctttggtatttcagatgtacttttaaaattatgtccctggctgcttagtctaaaaaacaatgtttattttatttattttaatactggaaatatgaaaggacatgactaagatccagccattaccttagttatgacataagagaccttaggagctgagaattagaaacgttcatgtatcctataacttgtccacattttctagaagcaaatcaggcaaataaataacccaactgaaattttcttaggttagattaactccatgtcactatttctatagcaggaattgtaaatgcctgtgtttataacatgggtcattctctaggagaatgtttaaaaaaacattttattgttttctgggttatagggtgaatattatagaaattttggaaatatatgagtataaataaaaaaatcacttgtatgtaatcttatcatccagagataacagcacaaacgttatgttgcaaatcaaaatggtgaaatgcctttttaatgcttgttatgcgggtgttttccagttgtgcatagaataactttatatgaaaggcactgaaacacacttcatgatgcaactgttgcctcatctatttaacaaatggtactaattgtgcctatttatgtagttaataaaaatgtaaagatagctgaaaagtagcttttccatgctctaatgttctcttacataacgtctacccaaaatatccttgtttgttttttcctgccctttgttttgctaatttgcttttttattttgataataccctcttaatgtttttacttttttcttcattttcttaactgcagggatttctttttttttttttttttgttctttgtcattatttaccatgtgtttctttctctcactgctattcattattttcccatttctatttttattattctggtcattgttaaacatttcatttttccatctagatactttgttagatcttgaaggattagcaactaattgtcatccttgagatctcatcttaacttttaatcagtattgatatttcttttaaaagaaacaagaccctttactgttctggagtccaacttaattagtcaccttttgtctttctctgtgatgctcctgccatccagaacaacagcataatgcctgaccccctctgtctcacacacatataaggcaggcagttaggagattttgacatctaggctgcagcttttcattgaaaatcttgcagaaaatcttgtgtttgcataaatgcatgtcactcaaaataagcagcaaaggggaaaaaaaagagtagctcttgggttttaaaagaggaagtttacttcccctacccccagtctcaatatttaacatctggttctgactaaagatggggaggaaaaacagacttaaatctccattcatcctgtcttaccaccaaacagtgtgatcactgatagcatttctatttctgttgtggtctgtatgatcagatgtttttgttaatgatttgtaagggaagataatgccttatatttctctgagtggttataatgtaacgtgccaacatttctaatctctagatagggctagatttaatcattatttaatgaaactttgaaggaaataagttattgctggacctcatgtgtttctgtcttatttcaaagagaaaacaaaaaacagaaacctttaattaatctactgataatatttattttattttaaaattttaatttatttcaacatttgaataagtaatacattcaaatgggcagaagtgaaacagtcttgtgagatacctgttttttaaaactccattttagaaaaggaattaactaggactttatatctcttcgttcaatataattttaaagaagaattgttgaaaagtagatatgttttgccatttgctgagaatattttgtacgttagcttgtctcttacaaaaactaaatgtgttcctacttctgataatgtatgtcaatttaaaatttggaatggccaaggtaagttgctctgcatctgcccttcatatggctcctgagcacagctcagtgactggcccttgcagtgcttctaccgttgtaatgggtaaaaccaggggaaactgccttgctcttgagcttgagcaggttaatcaaaaggatagagcttccacttctcattattctcctttctactttgatgggcagaataaggggatgctcatggaagagaaattcacacccatgaaaagcaaattgccctgatgtctgaatcacattacaaatttgaattaaattacaaacttaaatcaagtctaatgttacctacattgttgtacatgccatcagaaattcaaaagcattttattggacaactgaatatttattgaagtccagaatttattatgtaaacttggtggttagatttttctttctctttctctgtcttttaacctttattttaggttcaggagtaaatatgtaggtttgttatacaggtaaactacatgtcatgggggtttggtgtacagattatttcatcacccaggtaataagcatagttccccatgggtagttttttgatcctctctctcctcctgcccttcaccctcaagtagcccctggtgtctgttgttcccctctttgtgtccatgtgttcttggagagaactaaacatcaagtgagagctaaacaagaggatatatggtatttggttttttgctcctacattagtttgcttcagataatggcctccagctccatccatgttgctgcaaagaacatgacctcattcttttttatgacgtgtagtattccatggtgtatatgtaccacactgtctttatccagtctaccattgatggcatttaggttgattccatgtctttgctattgtgaataatgctgcagtaaacatatacgttcacgtgtctttatcgtagaatgatttatattcctttgggtatatacacaataatggaattgctgggtggaatggtaattctgttttaagtactttgagtaatcaagattgctttcacagtggctgaactaatttacactcctaccagcagtgtataagtgttcccttttctcagcagtgtataagattcccttcccagcacctgttattttttgacttttcaataatagccattctgagtgctgtgagatggttcccattgtggttttgatttgcatttctctaatgattagtgatgaacattttttcctatgcttgttggttgcatgtatgtcttctttggaaaagcgtttgttcatgttctttgcccactttttaatggggttgttttttgcttgtaaatttaagttccttatggattctggatattagacttttgccacatatgtagtttgcaaatattttctcccattctgtaggttgtctgtttactctgttgatagtttcttttgctgtgcagaagctctttaattaagtcccatttgtcaatttttatttttgttgcaattgcttttggcatcttcttcatgaaatctttgctaagtcctatgtccagaatggtatttcctaggttatcatccacacttttgtagttttgggttttacatttaagtctttaatcctcatgagttgatttttatgtatggtgtaagggaaagggtctagtttcaatcttctgcatgctagccagtttgcctagcacccatttattgaatgggaagttctttctccattgcttgtttttgtcaactttgtcaaagatcagatggttgtaggtgtgaggtactatttctgggctgtctattctgttccattggcctttgtatctatttttgtaccagtaccatgctgttttggttactatagccctgtaatatagtttgaagtcaggtattgtgatgtctctagctttgttgtttttgcttaggattgctctggctacttgggctcttttttgattgcatatgaattttaaaatagatttttttctaattctgtgaagaatgtcattgtggaaggaagataaatttttaaaaaatcacggtgttggcctggcatagtggctcactcctgtaatcccagcactttgggaggccgaggtgggtggatcacaaggtcaggagttagagacaagcctgtctctactaaaaatacaaaaattaaccaggcatgttggtgggcacctgcagacccagctactcgggaggctgaggcaggagaattgcttgaacccgggaggcagaggttgcagtgagccgagatggcgccactgcactccagcctgggcgacagagcaagactcagtctcaaaaaaacaaaaacaaaaacaaacaaatcacagtgttatggtattcaccataaaagatgaaaaacaaaaaaccataagccaactttctgatattagcctcagttcatggacttcggctatttcacattgagctttgggcgacaagttttgacagaaagtagaggttcctctcctgtggtcatgagcttgtgtttcaaggagttaatgttaagggtgcagaagtctctttcttctttatccagagaataagggggaaataaatacattttatacacacatactcaacatatatctatccacatatttatgcatatttatagtcattaatatgtaatatttccacatatctaactaagtatctgtttcttagataaaggaaattatatgatgtatacttgtgtttttggtttctttcgatcaacattatgatggtgagattcatccttattgctgcatattgttgtactttgttaattttcactgctgtttaggtttctagtttgtgactggttcataattgatctgcttattgatggacatttgttttgaataatgttgccattggctcacgcctgtaatcccagcactttcggaggccgagttgggcagatcacaaggtcagcagatctggaccatcctggccaacatggtgaaaccctgtctctactaaaatacaaaaaattagccgggcgtggtggtgcgtgtctgtagtcccagctacttgggaggctgaggcaggggaatctcttgaacccgggagacagattgcagtgagctgagttagcgccactgcactccagcccggcgacagagtgagactccatctcaaaaaaaaaaaaaaaagttgccattattcaaaagaaggttctgtgcatgtcttttggtgcatatatgcatgcatttcttctggatatgtggagtaagattgctgggttgttgggtatgtatatactctgttttggtagaatgtatgtatatatttttaaatgtagttttatgtatttatgtggtatctgttattaacattttttagtcatttaataatgagttgtggcttgttaattgtttagctcacaagaacgtcttgcctacttgtattggggataatacgataaggtacgcatagtttcagtggaacttgtagttcaaagactcaattctagcccctagttggtttgtgacattgggtctgtcacagctttaggtttgcagtttcacctttataagtaagatcgaaattaataaatgatctctgaggtgacttccatctgtacaattctgtgattatttcaaaatatcctaaaagactgttacagaagtatgctttttaaaaatatgctgctgactctggggaaacaaactgctccgtaaggttaatgtcagattgtatcttttttacagtaattaagtagtattaggttaggcagaaatctatttggatttttcagtagcaagcctgacttttagtaataggctagttcacataagaccgatattaaaataacagtttttttctttacatggtaacagttgtcaagaaatttcacagaaaatattcataattaaattaaagcactacaagtgtattacttactgttaagtaatttgatgaccgggaattttatgcccaaataaatctttgtattttgtgttacattttcagttgagttcattgagtcagatgggcatcatcagtcttatttttagtgttgcatgggtatattttaataattcattctttttctcttggccttttcccatatataaactctatttgcaagttattttcagagttggaaaataatgagctaatattttcatacttcatattcatagatgaataactagttattagcaggccatatttaatttatttttgtaagaagcttctttgtcacccttttttgcatttctttttcaaagtttgtagtgtatattgagttgttcttcacctgtgattagaggcatgtggatgtactgcaaagtggaacagctacacctcggattttcctgagagttgctcctgatgagttccttagcacccatttgtgacgtggaactggaagttataataggcattttagtgaatctttcatgaaattcagtttatttcatttaaatggatactttttttttcctgagattcttttccttgttcttcttgtgtgaaaatattaatgacaggtaaataatagattttgtgttaatggtgttatttgatgaactaaataagagtcctatgtcaatccctcccccttcctttttttttttttttttgttaaacattttagcatctcttaaagcatctggaaaccagaggtttatggaaggaacaccttcctccatcagttccttatgaaaagacttgcttcctgcatcccagcttttcagagccccttagttcattttacccttggcttattactccagggccagcttcccagagagtgctgggcatgcttgtgtgctccaccaagagttctgcctttcactttccttctctcaggtaccagaatgtagcggcatttcctgtaggattctgcagctgctcctttcaaatcactctctggccttgttctgtgatgttgcattcaacatcccaccacagactgtgtcaagatctttctcttttgattagaggttctcaggacaaaataagttaacagtgctcgactgacattttccaaggatatttatgctggtggaagcaatcaggggaggccctgattgctctttaattattaagttacaaggagatacataagaggaggaaaaatcagttccagaggataaagcatcttagtggtgcatttggagaaaatacttttttatttctttactggttggtcttacctttttaaatttgtttcctcctttcctgaccttaaggatagaactagacaccgcagatggattgtttgcatttaggaatctcagaggttaatggtgattgatggagattattgagggaggaactaatttgctcctttctcgaattaggcagaggtgagtcacacttagactgaacttgtgatgtgcctggtcctcttccatttcttgtagtgggaggaagcaaggaaagagccgccctctttctgacctttggcagtctgttgacccatcggaagaatttaatttttctcccaggatagaaatgtgggggtggactggggtgtggtgatgagggaattatcagtctgatgttgatatttacaaatgtgaaaagtacacgctgtcccaggactgggctgtcaaagactaggggatgagtacttcagggttattgagcaagagggatgacaaatgaaagtcccataagtagttgcccttgaggtctgacctgagagagaagctaactcactctaaaacaatgatgctccagtccagtagtgacgttagcagcctccccacttgggagggactgactgatagatatgtggtttgggacaacagagaggaattgctttcacaaatctttaagtaagtactgagatcttgaagatgctttagatgtagttttacctagaggcagagcaatgaaaaataaaggatcttttgagggtcctgctaaaccagtgctttcagacattaaacttgcataagaatcacctggggatcttattaaagtatatattctgagtcagcaattctggggtgggacctgagattctgcatttttaacaagctctgaggtaattgctatgctgatggtctaaggaccaaattttgagtgccattattagacacttatttaaataaaattcaaattaagattcaccactccgtgtagtttttccttctttacacttaaatatgaaaatgctgtaaacaagatattgtattattccttgtggcatatataaaatattatggaatgtacgtgataaaaatagatattaataaaatccaaattaaactcaccaactaacataatggaaataaatgctgatcagaaaccaaatgctaggccacccattgctatttacagatatccccatgtggtactgtattcatgtatgtgtgacaccagatgtctggaaaacagatttttgtgacaaattttgacacaggaaatttatcttgctccataaaacttaatggaaaaatgtaatgcttaacttcagtccattttaaaagaacggatttcagtgtagtccatagaatcaagtgggatttattcttgagagctgctaggagtctctttatcaagagaattacctaagacaacgtcagtgggtggcatggtatttgattggttattgataatatgtgttttgagtttgccatattcgctcagtattctattttagatcatgaataaaggatatatttctttactacactaaatatttatcagatgaatcatttctggaagtgagggaattaactgtggtattttgaaagagaaacacatcttttcagaagtacatcaacagtgtgatttctgaatgtgtttcaaacggttaatacaccaggggctgagactccgccaaagtagaacatctgcttctaagacataggcttctggtgcattcttctctgtgcactattgttttcttttgcttgttttctcaatttgttaaatctagattatatttcataaggatacagggaagaaacgctcctagctcatttgttatcttacaacagagaaatcttcaacagatcttttaaatttgggtaaaaatctaagaattcctaatgattaaattatgcctggtgataacgtattattgaaagtggttttctgttttgaactccccactcatgcagttctccctggtggaagcatggttgcacatgcagacctctgaattcctgagcagcatggatagaaggggtcctgtgctggtgcagtgggcagcctggatggggaggcagggtcctatctatgatgtgttcttgctcccctatcagcctctttcctgaatacacatcacttctatccctgtagtctgtcatattgccatactggtctacatctgtatgccttcatctgccaggcttgttgcctggcacgttcttctgcatttgctctgctcctcttaacagagttgaacacctctctttagttcctgtgttttggaagcaccttgaatgaccttagttgtacagttagagtgtatgtaattgtgtgtttttatatctaagtaaccactagactgtcgactcccagaaagcaaggactgaactggtctttatcttatatttccattacctaatgtagtggcagattttagcaggtcctcaaaaaaggttcattgagtgaataaactttattaaagtcgatggaactccatatatgttgattataattttcatgcatataaaatcaatctgaaaacagggaaaactgatagttgtgtaagtaagctatacttgtagacaaagaagcagcaagctgtgacatgagtaagatgtgtaagaaaatgtaaagattttctagtgctgctttgcagcctgatctttgtggattatttgtagcactttttcctctattttaatatttaattccttaagaaataattaagcaagaaatcattttaaaaaagtatacaatcttcctatcattttgatgtttaacagaaatattaaaatttgtttttaaaattattttcttatttttattacgacaaaataatcagtatcttcagagagaaataatggttgattctggtgcttaccatatagattaagtcctgcaagtcttgggtatagcagtgcatctattgaataaccatttcactaataacatttacacaggtagacaggtacagtgatctgttaagcaatatttttaaatatcttcttaaaagtattgtaatgaaaggtcaggtacagctggatgccgaaagaattacgctaaaaaaatcagtatgtatctttagtgttaataagtaggattattaatagtgcttgacttttaaacagagaccccattgaatagaactagacaagccaatatccaggatgatttcttatctagacatatgtcaaatctagttatgttaaattgtcttcagaaaacacataatttaaatggcagcgtaattaaaagacactgctgttaggtctataaacattctatgtctttgcttacattttaccacatacaatgtcaggggtttttctacctttgagaacttaaaacttgtagaaattaagtctattgtcagtagaaatcagtggattagcttaatggtattttcacagttcagttcattgtgtggttatctaagtaaatacgttttgggaattaattgcagtaaattccttctgattcaaatctgggtatgctgctttccaaataggatagtacaaattttttctaaaaacgttccctggttggtttttttatcagagaaaatacagaacttgtaaaatttataatttttaatgtaaaaactactttgtttaacaagaataaaattcttaaataagatgtttgatactttctacccagcttcatcactcatttctattctcagagagaaaagagccctatcctttcaagtgctagaattgagtatcgtgataatagtagtagattggtagctctaatagtgctaataacaattaacattattgaatgcatactctttatcagttttctaagctaattatttattgctgtatagcaaaccaccccaaaatttcgtggcttgatttaacagcaattattatttgtcatggttttgtgggtttaccgaatgttttttctgcttcatataatgttggttgggatgctagttcagctggaaggtccagtggctttactgtcatgcctagcatttggtacttggcagctgggaacatacttgggtctttctacgtgatttcttggacttcctcagaacatggcagctaaacgcaagagcatttttaaagaggcagaggcagaaactgccaaactttgtaatgcctagcctcaaaaatttatgtagcgtcatttctaccacattctattgagtaaagcaagtcacaggctacttcagtaaaaggggagggaaatagactcccctgtgttgggaagagtgccaaagattttgtggccatttttaattttttacagattgagctaagtactcaatcctttacaaaattagctaagtacttttacaatgtatgttttagggatcagaagactgagacttgaagaggttaagtcagtgtccgaggtcatctagttactaagtaccttaagctttagagcaagcttgtccaacccgtgacctggcccagtacagctttgaatgtagctcaacacaaattcgtaaactttcttaaaacattatgagattttttttgtgacttctttttttaagctcatcagctattgttagtgttagtgtattttacatgtggcccaaggaaaccaaaagattggacactcctgcttttttttttactttagagctggagcttttcaccgttgtaatatattaccttcaatggtataggcagataaatttgtccttctgctccaaagccaatatctgaggaagttttatttatgtggcgggataattgtctttgcagtcagtgagattataaagatatttggatcacattattgaggagccatcatgtggtaaaagtagcagtctctccaaatttggaaatttctgagttgttgggtgatatgaaaggtaaaatttttacatctgatgttatcctgcgtctactacaaatattagcacattgcctcaccaagagcaaataaataagtcagcttcttaaaccataagtttcccagtgggcatattccattctactacaatttatatttttcatatggtttcagtgttctagtgtttactattcattaacatgaaacacagattttaaattgcctttttaaaaattatttctgctgctttgtggttttctttgttttgagggccatgttattcatggagttttcattgttaaaaaaagaaaaaaagaaatgtcagtaatgcctgtgatggtaaagaacaaaataaaagtcaaggctttcaaatatactaattgaaagtttttatgcttatggtaatttgagttttctatgttagattcttggcatactgccttcaggatttcttcagtctaagactgaggcatattgaggaaagtctgtaagttgaaaatatcatatagcctattgtactttcatgttagctgtaagttgtgaaatggattcacagtttttgcttaaagcatatagacattttagcgccagagttatctagtctcctgctgatcagaataaaagtggtagatagccccatagaatgttatggggccatagaacgtatgtaccacaaccccctggttttatagaagaaggtttagataagagaagctttcactcttgttcatatcatggaatagtgtgaagggcagagttgtgtctagaaacctggtctgtcagcactgtgttttcttccactgtatcccagtatttccttaattagccttgttattagaaatgtaaaccaagtatccaagaaggtcctgtcaccaccactcagctgtagaataagttaaatccagcttaacttttgcatttgtgaaagtctgagacctttaaaaaatgcttagtcgtcattgtattcagaaagtttaagacttctatagtggttcagggaaattgtactgctgagaactagtaggttattacagccatgtttttctgtgattactttttatttttcattttgaaagaaaaaaactacctggcatagtctcaatgctttaaaaagacaggatttttctgtgagaccattgacatctaaattagtgttctcttgaactgttatcatgcatattaagacatatcatatatctaataaatggaagtaaaatggagttaattgaatcatctggttgggttcagctataccatttctttcatgacgttatatgacaaagaacacatgtgatgtgctaatttatctatataactattctgagatttcttgctcctaataataatttagttttagttgcattttttaggagactattataaaggaaggagataaatcatgaactagatttaaggatccagacccctccttctgtttaaagcaattttagactgtggatttaagtgtttgagctttctgttgtctggtttttattttaaagatatgaaattagaactaagaggtttttcttttggggaaggatatggaaaaaatactggtgtgccatttgtgaatgtactatgggggaaggactaacactttttagaagattggtaatcaatggtcatgcaagtggtttggcttgagtgccccagagatgccttctccgtttgaaagccgaagcagcgtggttgccagtggagcctttcagagtaccggagacattgcagtgagtctggaaatctattctgtctccagtaggcacatctcaggtttatcagagaacatcaatataatggctttttaatgacatttttgtttcttactgaaaatagggcaatttaaagaataaaagaaagaaaaaccatagtaattctactaaccagaggttactattgataatgcctttttgtgtatatcctgtatttgttttcctatttacaacacatcatctataatgtggtatttatagccttttaatttaatagaactaagattgtactgagcatagtatcgattaccctgcctttttcactctacactttcattttacccactttcccccccccgatcctctcacacagtgttatgtgtgagaatagatttccagactcactgcaatgtctcccatccttcaaagggccccactggcaaccagtctgtgttggctttcaaacggagaaggcatatctggggcacttgatatgcacttgcactaccactggttcccagttttctatgaggtatctatatcagatcatggctaaaatgagtgggaattgcttggcaaatttgtgtttgtttttatctttatatttgcacatactgaataaagataattttaatcctggggaagaggtagaaaaaatctcatgattttagttttctctgttagtattgcacgacataagcaccagagagatgacttttttcctcctttggttcatttgtattttacttgtcctattccaaaagaacagtattgaaatgagacacaggtatcaataaggaaaatttccagagccagaagaaggaaggaactgtcagggaacaattagtgtgacgggaaactatgttatgcttcctcagaaagtatgacaaatatgttacatttacttgagtttctggaaactgcacatgagggatatagcattaatttcctttgtcttgttggtattctgttttaccattcatgaagaaagaaaaaaaatgagagaaaataaaaggtctcagaactcacagagtaaagatatttttctaattgaaagtcaaacttcagagttgtaattctctgttaaagtgggttttggttaaaaattattttctgtaaactaattttataggctattcctatctgtctgttcattagcacagttttggggtcagcaaattattccttatagtttaaaaatattttttataatctttgaaattaacaaacttttatttgatagctattttaagaagttgttacaggtgtaagactttttcttctctaacaaagatgtgcgctgatagagctgaaacacaatatctatgtaaaataaccatggtgcccttcaaggaaacctttgtgccctggcagataaagtgttgtggcatgtcacatatgggaaggggtagggaaaagattccatgtgggtattttgacgtaaagctggtgcatttgagaattcaacaggctgagacatagaaacattgtatcagagtagggtgaacgaatggcttaactcacggaaagcagaccatttggatagcttggggagaaaacagaagtagtgtgagaaatggtggaaaggacactagaaatacttgaggagtttctaactatattctattgagtaaaaacaagacaaaagccatccttgatttgtcaaaagtgataaaaatggtgtaacaagtagaaataggattttcctgctgggtttggggtagaacttggaaaaaaaactgatcaattatgtctttttgagccatgtgtttaaaattaaggtggaggatcagaagcaataaatatggattaattgactccattcagattgccacttcactgttttatgatagactactgggaatagcaaataataagaaacttaatgtagatttgtttaaaaaatttgttactactgttgtttcaatgtcaagtttattttgcttgttgatgaaactggtcttttatcacataactctaggtcataaaagtatagtttgaatttccaacatttctaatgtttctttttcttttgaaaaataatcaaagaaaaagttctgctatgttctggttacttctgtatgaatctcatagcaatcatgattttccattgtgtttacagaactttcattgtgttttatcgtaaaggaatgaaagaatggattattttttcttttttgtctcaatggagtggtctacattttaaaggtttattttacaaaaggatacttgttacatattaggtttcatcaaaagaagttcaatactaaagataaagagttttccttattgaaatatatattgttaagcttttaaaccaaatgaaagtatgagtggtcatatttatactgtagtaggttttcataatagattttccggattaaaaccatttgttgaaatcatcaaagagatgttaatcctgctttagcattaatgcaaagttaaaataactgacattaaaaaaatcatttgggaagctttattgaatatattgagataaggtttattgtagtccttctcttcatgcatactgctgttacaattccaggaggtttcaaaatccatgtgaatgaccccattcaaccctcaaactgtccaattcctggcctaattcaccttcactctgctgtagctaccagttgcaggactagctgcattttggccagaactgcatcaccctggaaattttaaacacactctctctcttctgattgccctctttttctggttccatctcagctttattcccactgcattgttctttatctttggagctctctaaatcccttaaattcattgggtataggattctgtcatcttcatctttgtaatatcagtgcctagactaagcctggcgtataataggcactcagagatttgaagaataaatgactaaatgactgtatcaaatacttgcccattgtttgctgtttctgaattgtacaaggccatcatgataattgatgatcttaataatgtgagaatatgattctcttaccttagtaagagagccatcagtttattggatgatagttatatggaaaaagaagaaatgctactgtgataaatatttataattttaaacaagtggtaagtagaattaatgataaataacttacttattgaaggttttcaaaaaattagatgcatcagggtcttacctacatgtcttatgtatttttattcaaaatttttagaaatgaggaaacaggttaagtaaccttttctttatctttaaacaggctaaggatattaagccagtactaacaaacttaaggaccaaactcgtcaatatgtaagatactagaaaaattaatcagaatatattttgaatatcttgtggaagcttctcaaaggatattacattgagcatcataggctggcatgttatttcatgttttaagtaaggcatttgtaagttgtccatttaaatatatttattttagaaagcaaatatatttgtcctgtgaagagcatccttattttgagggatagcttcttgctgttaataaaacttcgtagataacatgttggaaagaataccacaggccgggctcagttggctcacgcctgtaatcccagcactttgggaggccgaggtgggcagatcacttgaggtcaggagttccaaaccagcctggccaacatggagaaaccccttctctactaaagtacaaaaattagccaggtgtggtggcatacaccctctggaggctgagacacgagaatcgcttgaacccatgaggtggaggttgctgttagcctagaatagggccactgcattccagcctgggcaatagagtgagactctgtatcaaaaaaaaaaaaaaaaaaaaaaaaagaaaagaaaagaatactacagagagatcaaagaatgcccaaagttacctctcccagtcagaattttgggtgtaacctccctagctgtgctagtggtggatgaggtgtttaacaaaggaaatgtaagatcttcctttagttgccagttcagtgtagttttttggaattagtttgctaaatttcttttaaagtgatcagtttagtatccaaaaagtaaaatggagcaagttgaaaaattgtcctgcctgtgtttcagtttaggttgttcctaggcgcactgctgacttctcttatgactttgggtagattcagtctttattggtatttgaacttttaatgtctgttgtgtactctccttagacacatttaaaactttaaagcatttgggcagggggaatgggtaaggatccagttttatttaagactgtcaggacccatctcaatagtagtatctattcccatgagagaaaaatgaaaggcaaggcttacatcagcctagtctcctcacttaggaatcacaacattcctaaggtcagaaacagtgtgaagtaagtctctgaacccattttggagggcagtacatcagaaatacagtggaaattgctctttagctggatgtgagtttcattttaagcaccactgtttatattctttatgtcttgcctttctttttatattgagtttgtttcaccttgtaaaattaagaagagcatgttctagcttttaaatgtgagaattgaattattaatagtttttgggtaaaagtatcacctcccatttcttctaccaaaagcagcacatcctcacagacttttcacctcactgaaaatggtcatttaaagtttttactaattcagcatttaaagctttttatttcctccttgatttataacacagctgtttcttgaatagaaaaaactcaaggactacatgcaatctaattagattacattctttgtgtgagtctcctgcatttagtggaggccactaatcaaatcttgatatattttctatttcttttatttatttattcatttaattcatcaagtcaagatggctataattagagcagattactcctaccacattgtattatgatgatctcttcatgtttttttgtttcatactatatgatattcattaagggtagcattgtgccatcctccatcaagcattatatgcttcctttgtgcttatgatgttgaccgtagcaaccttaaactgttaagacttgtttataaacggtgaagctccatcattccaacagagtcagcatgctaattcactctagttcaaatccacattctagttgaatccctgcaatgtaacttgacatttggagaaattgattcataccattttaaagaaatatgatataggtgacagaatccaggatgaagaggtaccttgttgcttagatgatgacgttgtggattcatttcacatctctctctctttttaatgtagctcttctccctccttggtttttattcctccctccttctttcttcttcaagcctcctctaatgttaacatctttggcagtttggccagtgttgacaactactttttgattatttggtattttaaaatatttggtattttaaaatgcttttattggccaggcgtggtggctcacaccttataatcccagtactttgggaggccgaggcgggcagatcatgaggtcgagattgagaccatcctggctaacacggtgaaaccctgtctctactaaaactacaaaaaattagctgggcatggtggcgggcgcctgtagtcccagctactcaggaggctgaggcaggagaatggcatgaacctgggaggtggagctggcagtgagccgagatcgcgccaccgcactctagcctgggtgacagagcgagactccatctcaaaaaaaaaaaaaaaaaaaacaaaaaacaaaacttttattgtaaaattatttattacaaacaaaatcccatgcaaagaaaatgaataaatgtgatggttaatggaatatatgtggaaataagtagcttctcttataagtgaaagaactgatatcgaaaattccatgtaaaattaattaaaattaaaattacatttgtaagattattgagtcttttctttctgggcagatttttatttagttagttgtttggggattgtttgggttttagtggcagaaatatattcttcataagtatcagattctttattaggcagtcatcattttaggtcttacaatgatgggaaatcccatgggcttagggaagattggctaagtatggaaaaattacgtaatagaaaaaattccatctacaaagatgtgtgattgtttcttttcttctccctatgtctagatggttagagatgactgtattcttggattgttttattttcaaaattgaaagtttttttttttttaaatgggtattaggctgggcacggtgtctcatgcctgtaaccccagcacttcaggaggttgagatggttagatcacctgaggtcaggagtttgagaccagcctgaccagtatggtgaaaccccgtctctactaaaaatccaaagttagacgggcatggtggtgcatacctgtaatcccagctacttgggaggctgagacaggaggattgcttgaacccgggaggcagaagttgcagtgagccgagatcacaccattgcactccattctgggcaacaagagcaaaactccatctcaaaaaaaaaataggtatcaaaggatgcatagtgggatggggaataaagaaagcacatactacatagcaaaacattgtaaacaaaaaagtcacagcgtcatataaaaaagaaaacgtattttctatgataacaaatttaaatgaaattagataccagaatagttttcagttctctttctcttttttttttccttttaagctccaacagaatgagtttgtcagttcttttcataccttggtgtcgattgcaacctctataaatatgttaaataatggatttctaagatgattatttacatatatatggagtgtgtgtgagtgtataagtataaagtaaatatatatattctggaatgtgtatgtatatatgcatatatatattcaactatttttaacaatatgagcttgagtttctttcaagactaaaggcaaaatgtattttttcattgccttattttgtgcaaaagccaaataaaattgtggtgatccatttgcagaagcaagaaaatagaagcatatacacattttatagtcaatcagtgagtattgatataggtcctggtgattattagagcttctagactataaaaaatgttactatgtttcttttaaagtttagtgtctgcatagccagtggatcagatacccagaatgggtgggtaatcactggcgttgtgtttcagactttagatctaacaagtaaaaattaaaaaaataaattggatatgattaaaggacaaagaatcaaggggatggagtgcagccaattcagaaaataaagaacagttggtttaccctaattatagccattttgatttttcttttgtatgtatcaattggaagtttggtaaaaattaaatctttagcccaattatagaaataaattcattgcagatttcctaaggtgactttatacttttcttaaactcaaatctttaaagtcggttgtagtttgtacgagccacaagtctttcctttgatatagtaaaacagtttactttttattttttaaaacaatatcttatatctaccatcatctaaattgaggatatgttaacataaatgacaaaatcatattgatatcaaagattcaactgattaagagaaattttacacttggattaggatgagttgtgcaaaagtggctgaatctaataaaatgatgtaacatttatgtatattataatgaattttccagattgtttatgggtacaggtcaagcattaaaataaggcctatgttatgccctcccccctttcatcaaaaagctttccgtagataagttatggaaataggtgactgtttttttttaaacttttttaaggaagatgaatttattgattttatagaatatcttattgcattcttcttattactacttttcccacttttgatcatgggtatcttttttctgtattcatcttatacaggaagttatgtatctcctttgtaaattagaaagagtgtcatccaatgattttattgtcaggtgcatattaaatgatctccttggtaaaaaacatgagttattattattatttgacagttattaaacacagatacatgagtaaatatggagcaaagaaacacaactttcaatgacaaaggtctgttgatacactgtatggttttatatgttgcaaatttgatgactttctctgtgttaatttccctctatatttttattgagtcctaacacacttgcctccactcacatcccaacacacacacatacacacacatgcacacacacacactctctctctctctcatatatacaggtgcacatacacatgcataatagctgaagcttcaaaatgaaaacatatgcagaatgtacctattgatttctggtcattctgagcaaaagggaatataaagaaataaagtttgtttgaaactggggaagttatttagtattttgtgttttaattgcttcttaactatctaacactagtagttttatgccgattaacgtaatattgaaaatttaagaaatgttagcaaggattataggtgattgatagtactgttttgtagtatgaagcatggtttaaatcttgtcagaatccccagaacttaacatggaaattagaatagagctgacacctgtatctccattctaaaccatttagtcatattactacaattttttccttctaaaacagacttcatcaagtcttcagaattctgaatccattaatccatttgactctccatttatttcttttctctttcattttttgtttttgagacattgtctcaccctgttacccatgctgaagtgcagtggcgtgttcatgtctcactgaacctctgcctcctggctcaagagatcacatcagcctccctaataactggggctataggcatgcgctcccacgccctgcttattttttgtagagatgaggtcctgccatgttgccgaggctggtctcaaactctgggctctagccatttggccacctcagcctcccaatgtggtaggattacaggggtgagtcaccacacctagcctgactctccatttcttatagcagtacctcttaatgaggaaagcacattagaattgcccacagagcttctaaaatatgcatatatctagaacccttcctcagaaaatctgatatttaggtaggagtggcaagcatgtataacaaaaactgtgcattgattcagatgcctctttatgtcatgtcccaactaaagtttcttactctgtctcatgttattttctcctgttaccctctgctctgctttcactgtgccaaaaatgatataataccaatacattttcattttatacttttgtattagtacttttgtacatgctgtttctactgcctgaaataccttttacttccctctgcatcctccctttctctcctctccaggtcttttatctgtcaaacaatgagttttcttcctagattctcctctgatggcaaatctttccttactcccccaggtagaaatagtcactctctcttttatgtttaccatttatatttgattattaattttttaagtgtccatctcttccattaatctgtgagctcagtgaaattatgtaatttatcttatttgtgtttatgttaaatgaatacatggataactaataagttgacagctttgttaggaatttaaatgtacaatgttttcataaactttttttaagggcagcattaagttgaggttttcgtgatcaaccaccaagacatacgttgatacatacataacattgtttgtcttaatatatattaccataaaaatttgcatgcatctaggtgtttatttcttatcttcatttttttcccttgtgcctacagacgaaatctcacaaaactgtcccttatcttcagtcacatgctggcagaaatcaaagcaatctttcccaatggtcaattccagggagataactttcgtatcacaaaagcagatgctgctgaattctggagaaagttttttggagacaagtaagtaaaaatcatttttatagctgtggatctatctttcaagggttactgtatcctccctccagttggatatggtatatattttacttgagtgttttgtgaatgtattttattatttttgataagcattttgattgattggtaatttttatagtcaccaaaggtatgcctcaataatgcaatagttttttagtcactaagtaaatattatacaatgttatttatttcatgagcattcattgagtttgttctgagaagcagaggtatgtaagagtctttatacatgagaagctgataacttcttataatttaatatgtacttaatatacaaaataaagggtagaagggcatagatactttaaaaaatggcataagtaaattgctgtgacaatttagaagggaatagttgctttgggatcagtgatcagggactgcttcctggaggaggtggtatgttaagcttggttaaggtctgaaatcgaggtgagagaaggccctggcaccctgatccagcctttctttgttttactgcatagagattatatatgtgtgaacaagatatgaggataatgttatcacaaagatgtagtctgttgcaaagtagttaaagatgtatgccctacagagacacagattctggtgagcttggtagataatggaattgaatatctaaggtcagcataatttatataaaagttgcaaaacttttgtcataaatgtctcagtaaaatgatcaagaatgagcatcaggaggcaagtggtttccccagtaaccttttaagaattacctttaatgagagcgcgtcctcagaatgtcctagaatgtaggcaaagccctggctgagtaagtaaggaggaagtgtgactgcttacatagattattgttttaatcttgtctcaaaggtctgtatttgtcctttaactgatgaaattagacataaaaattgttagtatacactttttttagtactttgatatgttgaactgcgatattggttttcctttgtttgtttttgtttttgtttttgttttttctttacaaagtactatagtttactatagtcaccaccaagattggaatatacctacatagagtaatgtacatttcattaagcacacaatttttttggcatccaaaatattaaagcctatttcccacattgtactaaaatgtattctgaattatttttaggcactaaaggagaaaatgccattgttgccattaacatggaaattctgtgttgtagcaatctagttatttataatgttcatatattcattcagaaatgaagaatttagaaaaaagtttatccttatctgaattagaataacacagacagctaagactatactaattaaatatttattaattgtagaaagcagaacaatcttgccaggttcagggtgtaggaactgagagggtttgtttcctgtagttgcagttcatgtattaacattgtaagcttagttcaaacagtcggtaaccttcaaaataaactttctcttaaagttttaagaaaatatataggacaaattgattatggtatttctttttgaaaactgaaaattctgatgagttataaaattgtttacttgtcataaggtcaataaaaaatggaaagattgctcacaggttttttttaagagaggagtttactttgctggtacttcaagccacagaaaattatgcatttgagacatctttatttccctttatttataaccacagacatcaaggggctgaaatttctgttcaactgctacatgagtgaaatcactactacatcaaatgagggattcttgaaatagtgattagatactttccctacctcccaagtcttttcacttttgtctgctgtttttactgaattgagaaagctgcttaatttttctttaacacttttaatttgtggatgactgccaaatttcatgctccttttggaacttatatgcattaccatagtcatacaaattaattattcctttattagataattggagaaagtatttttttattcttcctaggtttttaccttgtggttccataatattttattgaatgaatggacatatgcatgaataatgtgtatcctttcgaaaggttgaattttttttttccattatgctctaatactgtttgtattttcccaaaacttagttctcctgtgggagcatgcctgtcatttatctcactgttcattgaggccatgtaagaatgctttcatttagcccaaccagtgcctttaaacttgaaaacagcattctttcctaaaacagaaccattaatccattcatgagggcagcgccctcaagatctaaccacctcttgaaggtcctacttcttaatacagtcgcaatggcaattaaattttaacatgaattttggaaggggcattcaaactatagcactgttgtttttgaagacatggtagtgctaccctctctgctcagggcccaagcccagcagccaagaggcactgcctgccttgtggcccaaggggaacagtaacacatgtatcatggcaaatttgttgggggattctgtttatggtcaatttttatgcaaatgaatatattttaacaatgcagtcatgcttttcctttcatagtctgttgaccaggagttagaaatctgtaggaaaagaaaagtgacattattgaataaatgtgtctaagtatgttcagcaaaatgagaccaatactaaactgaatcttcacactctggaataataacttataatccagaaactttaagcatgaagctcgaaaaatatattactagcgttaaaaaaagaagcacatcaatgtgattagactctgggtgacagtcatttttcttagcgagtcaggtagcagcttgtgactcatttaagtactttttgacattgagaaaagtgattgattgaagtggtgatttataagattttagtgcactggtcacctgagcagtgcacactgtacctaatatgtagtgtagtcttttatcccttacccctctctcacccttccccaccacgaccccaaagtccattatatcattcttatgcctttgcttgctcatagcttagctcccacttataagtgagaacatacgatatttggttttctatttctgagttacttcacttagaataatggtttctagctccatccaagttgctgcaaaagacattatttcattccttcttatggctgagtaatagtccatggtgtaaatatgccatgttttctttatccgcttgttggtctatgtgcacttaggttggttccatatcattgcaattgcaaattatgctgctataaacaagcgtgtgcatgtgtctttttcatataatgacttcttttcctttgaccaggtatctggcagtggattgctggattgaatggcagttctacttttagttctttaaagagtctccatactgttttccatagtggttgttactaattcatactcccaccagcaatgtagaagtgttcccttttcacaacatccacgtcaacatctattgtttttaaagatgtttaacaacatctattgtttttaattatggtcattgttgcagaagtaaggtggtttctcactgtggttttcatttgcatttccccgatgattagtgatgttgagcattttttcatatgtttgttggctgtttgtatatgtcttttgagaaatgtctattcatttcctttgcccactttttgatgggattatttgttttcttcttgctgatttgttttaggtccttgtagattctagatactagtccgttgtcagaagcatagtttgcaagtatgttctcccactgtgtgagttgtctgtttactctcctgattatttcttttgctgtgcagaagctttttaattaggtcccatttatttatttttatttttatgcatttgcttttgaggtcttagccatgaattctctgcctaagctaatgtctagaagagtttctttgatgttatcttgtaggattttcatggtttcaggtcttagatttaagtctttgatccatcttgagttgattttttaataaggtgagagatggggatccagtttcattcttctacatgtggcctgccagtttttccagcacagtttattgaataagggtatccttttccaaatttatgtttttgtatgctttgttgaagatcagttagctgtatttggctttacttctgggttctctgttctgttccattggtctatgtgcctgtcattataccagtaccatgctgctttggtaactatagccttgtgttgtaatttgaggtcagatagtgtgatgcctccagatttgttcttttcgcttagtattgctttggtgatatggtctcttttttggttccatacgaatcttaggattgttttttctagttctgtgaagaatgttgatggtattttgatgggaattgcatggagtctggattgctttgagcagtgtggtcattttattcttcccatccatgagcaggtgatgtgtttccatttgttgtgtcatctataatttctgtgtttcagtgttttgtagttttccttctagagatctttcacctccttggttaaatatattcctaagtattttattttatttttttcagctgttgcaaaggggattgagttcttggtttgattctcagcttggttatgttggtgtatagcagtgccactgatttgtgtacattgattttgtgtccagagactttactgaattcatttataagatctgggagctttttggatgaatcttgaggcttttctaggtatatgatcatatcatcagtgaatgatgacagttcgacttcctcttttccaatttggatgcttcttctttctttttttttattggattgctctggctgtgacttccagtactgggttgaatagaagtggtgaaggtggggatctttatctggttacaattctcagggggaatgctttcaactttttgccattcagtatgatgttagctatagatttgacatatatggcttttattactttcgggtaaatctcttctatacatattttgttgagggattataaaggggtgctgtatgttatcaaatgctatttctgggtctattgagatgattatatatatttttaaaatttctgtttatgtgatgtgtcacatttattaacttacatatgttaaactgtccttgtatctctgaaacccacttgattgtgatgtattagttttttgttgtgctgttggattagttagctagtattttgttgaggatttttgcatctatgttcatcagagatattggtctgtagtttgttgttgttatgtcttttcctggttttgatattagcatggtagtggcttcatagaatgatttacggaggattccctctttctctgtcttttagaacagtttcagtaggattagtaccaatttgtctttgaatgtctggtagaattcagttgtgaatctatcttgtcctggactttctctgtttgcatttttaaaattactgattcagtctcactgcttgttattgttattgggtggcagtaaaccttacccagctctcctgcagttggtgaggctgatctcactcccacagtgctctgctaacaatgcttggtttagatccaggtagtctatagacagaactcagacctgccccaggtcataagcttctccacatagaaagctgccatggctttcaaaaagccatgcccctcttcgtcttcccaggcatggccaggcacccagctcctatgctcctgtctgcagcacacttcccacttgccgcaactcctccctccccattctgttcaagggaatttgttccactcgagattatattacaaaattcagttgggaggttctttcaccctgtgtcctttccctgagctcattggctgacttccagagggtccctgtgagatatattcaggaatagcttccctgggttcatgctggagattgggaagtcctgctgcggctcctacttttttatttccctaaatctgttccagctattggaagggtgaagggcttctccagtggcctggattttcagattccctggtggggatgtgtacttggaggcagactcttcccctctcgcactctgaggacttaggagtttttcacctgtctcacgtagtaggctatagcctcccaattctttcacagggtctgtggattctgttttcctaagttcctgtgttggttctttgggaaaaaattcacactgaatctctgcacattattctgtccttccaagtgggagaagcatgctgacactgcctccagtctgccatcttgaaaaaaaaaaaaaaacaaaaattagcattgagaagatttagacataaatttccaaacaaattataattcaattagaaacacagattctaactcttgaatcttcttacatagcctctcctctccatacataaaattctcttcttcaaatttaaattcatgctctgcattaccccaacaaccttctgattagtctccctatctccaataacaacctatcctattgttcttaggggaccagtgagctgtctaaaaagcagagctaatcattccagtctttcgcttgaagtgtttgcatgaatattaattctaggttaaagtctaaaatcacattaaacatcacaagctttagaaactttttcgctggcttctttttttctacttatcatttcggtatacttaactcatctgcaaagaaacaactcaatactgttcatatttcccaatgtgtgtctcattttttactcctcattgtctttgttttcgtatgttgcattcactgcttggataggcagtcacccatgctctatccagtgttgccactttgaaagctttactttagtaccctaatggatatccctactctgtgctgccaggtacctgagctcacatctgtcaaaatatattacagtgaactgctgacatgcccccatttctcaattgagaggtttccaatagactggaaagtttatttggaagcagagactgcatcttacttatttttgtgtttttgagcctgacacgtttcctggaatgtttaggcaataataattttttttttttaggtggagttttgctcttgttgcccaggctagagtgcaatggcgccatctcggctcactgcaacctctgcctcctgggttcaagcgattctccctcctcagcctcccaagtagctgggattacaggcatgcaccaccacgcccggcaatgttttttttgtatgtttagtagacgtggagtttctccatgttggccaggctggtctcaaactcctgacctcaggtgatccacctgtctcagcctcccaaagtgctgggattataggcatgagccatcacgcccggcggcaataattgttaacagactacatgaataattgcatagatggacgatgtctatcctctactctcaatttccaatgacttcattatatataaattgatctctttttaaatgatcagttcctacatttctattccttagatgcctctcttccctctttcttttcatctgtctcagaattttgacacctttctttaagttcagttcataagtccacttttctgagtttttctcattcatatacacccttctacgtgatctatgttaattactctatactttggttgctgttgtattttagacacatttatattgtaaaatgtgtttactatgtaggtctttcttgcttgattgcaagagtcttcaatgactttctatgcaaaagttggtgaaaacagacacatttattagagttattgtatgtcagattttgtgttcagtgctttcacatatgctagcctcattttcaatataatctttaaactactttgtaaatggttgttgaatgagtcttttacgtaccatatacattgtagacatttagtagttattagttgaatgtatgagtataggatgcaacttttctgccatttaagctctctcttcctttacttatgttctgttcttcagtcaaattggcttatttggctctttctggacacatcagcaattataggtttctatgtctttgcttatattgctccttctacttgaagatttttataatctctggcataacaattcttactaatccctcaaagataatattgctcataatttttcccattagtgttattactagatctcttcttaaacttcgctaagctctggcttatcttctgcatttactatttttatggttttattacaagtatttgtctagttgtcatacttccccctagactatatgctccatgaaatcaagcttatttattcatctttgtatttctaaagtagctcagcacaatgttttatatacaggctttcaggaaccattgtacatttaattcagatgagttgagaagtagaggaatgtgcattagcatgtgtatgtgtgagatggagcctgcttgcttgattgattgggagacagcatacttagggtttggcatgcaggctctgcagccagattatctgtccctggacaggttctgactgcaacatttactcactttgtgactttggggaatctagttggtttttctatgcatctttttcctcatttataaaatgtagatgatactaataatacctaccatcaatggttgttatgacggcttaaaatagctaaaccttacctgtaaggcacataaaactgtgtctagcatataataaatattctattttgtggaataattaaccaattgaaacctttaaaagtggtccaaattctctaaataatgtaatttacatttgactttgtatgatggaagtttcatactctgtagcaatctaaaagcaaaaaaaaaaaaagaaagaaaaagaaaaattttaaaaattattttatgtgtatcccgagatgaaggtagaattgaaaataagaaactgtcttggttaccacagggggaaaatggtttatttatagctcaatttattgcctctatgattgatttcctgcaaaagcaataagggccttctttggtttcccgtattttcctttcacttttaatatgaaagaaaggaaaatactttctttacctttccagcgagtgagatatatattcttctagcatattaactagctcagttttccctctaggtaaagaaaacacaacctaattatattaaattaaaagaagtggtacacagtagaaattaagagtttttacaatgaaaatttttagcagatactctaaagagaaagaaaaaagaactaaagtaggattcaaagaatcactagttaatatttctactagttagctacctccctttgttgcctgttaaaaaaaatttcaggtatctttatgtcaataaggaaaataaaaacttacatatctattggaggcctattttgttcaattcattgtaacaagatacaaaacaactaagatgccaattgtaattttctacctgtaagcaatattcagtttggggaagacaggatataaaaagaagataaatacttaaaatcagctctgtaccattagaaaatcacataaagaatatcacaaataataaattaatttactagtacatgcatacctcagagatattgtgggtttagtttgggaccactgcaataaagtacatcgcaatgaagtgcatattgcaataaagcaagtcacttagattatttttgtcttcctagtgaatatagaagttgtatttatactatactgtagtctgttaggtgtgcagtagcattatgtctaaaaaaatatatgtaccttaactaaaaaagaattgctaaaaaatgctaacaatcagctgagccttcagtgagttgtaatcttttagctgctggagagttgtgcctcgatgttcatggctattgactgatcatatgctgaaagttaaggtggctgtggcaatttcttaaaattaggcagcagtgaagtttactacatcaattggttcttcctttcatgtaatatttatctataacatgcaatgctgtttgataatattttactcacaatagagtttcattcaaaattggagtcagtcctctcaaaccctgccactgctttatcaaccaagtgtctgcaatattctaaatcctttattgtaatatcagcagtgttcacagcatcttcacctggagtaaattacatttaagaaagcacttttttgcttttctataagaagcagttttcgtctgttcaaattttatgagatttgcatcaatttagccacatatttaggttctacttctaattctagttctctagcaaattctacatctacagttacttcttccactgaagtcttgaaatcctcagagtcatccatgagatttggaattcactgtttccaaactcctgttaatgttgatattttgacctcctcccttgaatcataaatgttcttagtggcattagaaaggtgaatcctttccacgaggttttgaattttctttgcccagagctatcacaatatatgacagctatagccgtaggaaatgtatttcttaaataataagacttgaaagtcaaaatggctccttgattcatgggctgcagaatgagtactgtgttagaagacatgaaaacaacattaatctcctcgtacatctccatcaaatcttttgggtgatcaggggcattgccaatgagcagtactattttgaaaggaattgttttctctacacagcatatctcaacagtaggcttaaaatattcagtaatccaggttttttgttccatttgtagagcacaggaagagtagatttagcgtaattcttaaaggacctaggatttttggaatggtgaatgaacattgtgttcaacttaaagtcatcacttttattggccactaacaagagtcagcctgtcctttgaagctttttgtttttttaaataaagaacagaaatttatttctcatagttctgaaggctaggaagtccaagatcaaggtgctgacaaattgtctggtaaggacccacttcctaatttacagatggccaaacatctttttgcaatatcctcacatggtagaaagagtgagcaactatcagggggcttttgttttttctttttcaacctttattttggaggttatttagggggtacatatgcaagtaattgcatattgcatgatgctgaggtttggggtatgattgaacccatcatgtagctttgaagctaggtattgacttctccctagccctagcattttctagatagcattttctttcatcttaaggctgtttcatctacattaattatctgttgttttgtgtagccacattcatcaatgatcttagctagatcttctgtataacttgttgcttctacatcagcacttggtgcttcaccttgcacttttatgttagagagagcttcttttcttaaaccccataaacaaatttctgctagtttcaaactttacttctgaagcttcctgaattctcttacccttcacagaattgaagcgagttggggccttgttttggattcggctttggcctaacagaatattgtggctagtttgatctaaccaaaccaccaaaactttctccatatcaccagtaaggctgttttgctttcttatcattcatgtgttcactgaagtagcatttctaatttccttcatgaacttctcctttccattcacaacttgcctaactgtttggtgcaagaggcctcacttttgtcctatgtcagatttagacatgcctttctcactaaacttaatcatgtccataattagagacttgtgactattcctttcacttgagcacttgaggtcattttagggttactatttggcctaatttcagtgttgttgtgtcttagggaatagaaagtccccaggagagggagagagaaaagagaacagtgttggtggagcagtgagaacatataccattaagtttgctgtcttacatgggcatggttcatagtgcccaaaaactatttgtttcacacaaaaaatactgttttgaaactgaaaaactgggaatgatggcaacaatagatatgaattgtgatatgacagcaattggctagacctgtgtgccagctgtttttcttagataatctctcttctaattcatcacaatcctttcctggacatctttactaatttatattatatacctggtccccagatatttgattttttaatatctgaaagctatttggaaccactggactaatagtgtgtgcccctggatttatagaggtcctggtcttaatcctctaaacatttgttctcttctctgctggatgtgtctacttgggtcaataaagagagagaaggtctccttctagagcaaggatcttaaagccttgtaaaatagaggtagtatttctccctgggtcaaaggatatgcattatccattacaaaatatttgggttccttaagttctaggttctactccagaatcaaacccacagtgtatgcagatgtcacctggccctctttgcatcttttaggagaatttgtgtttagggaacaagggcaagaaaatgctggtactctagccactgctcttgctgtgagtaacaaagtcctttgactctgacccagtcctttgacagaaacccagtatcttctgccactatacatgaaactgtgataggccaacttcttagcttgcaagaagagtagaatctcattctttggttttttaggatcatgttctgctggtagagaaagtgtgacttaatagcaaagtaaataaaacttacttatattagtctgttctcatgctgctgataaagacctacctgagactaatttataaagaaaaagaagtttaatgcactcacagttccacatgactagggagacctcacaatcgtggtggaaggcgaaaggcacttcttacgtggcagcagatgagagaaaatgagagccaatgtgagatttattcactaccacaagaatagtttgtgggaaaccactcccatgattcaaatacctcctattaggtcctttctacaacatgtgggaattatgggagctaacaattcaagatgaaatttgggtggggacacagccaaacgatgtcattctgccactggcccctcccatatctcatgtcctcacattccaagacacaatcatgccttcgcaacaatcccccaaagtcttaactcattccagcattaactcaaaagtccacagtccagagtcttatctgagataacaagagtctcttgcacttatgagccagtaaaatcaaaagcaagttagttacttcctaggtacaatggggatacaggcactgggaaatacagccattctgaatgggagaaattggccaaaacaaagggtctacaggccccacacaagtccgaaatccagcgggccagtcaaaccttaaagctccaaaatgatttcctttgactccgtgtctcacgtccagggcacgctgttgtaagaggtgggctctcatgctcttgggcagctccaccccgtggcttcgcagggtacagtttccctcttggttgctttcatgggctgatgttgagtgtctggcttttccaggtgcatggtgcaaaatgttggtagatctactattctggggtctggaggacggtggccctcttcttacagctccactagtcagtgccccagtggagactctgtgtgggggcttcagccccacatttccctcccacactgctctagcagaggtagggctctgcccctgcagcagatgtctacctccacaagagccctgcccctgcagcaaacttctacctggatgtccaagcatttccatacatcttctgaaatctaggcagagattcctataccttaacttcttgacttctgtgcacctgcaggctcaaacaccatgtggaagctgccaaggcttgaggcttgcaccctctgaaataaaagcttgagttcaacattggccccttatagccatggctgggatgcagggcaccaagtcctgagactgcacaaagcagcaaggccttgggtacagccaatgaaaccattttttcttcctaggcctccaggcctgtgatgagagaagctgccgtgaagacctctgacatgccctggagacattttcctcattgtcttggtgattaacatttggctcctccttacttatacaaatttctgcagccagcttgaggttcttctcagagaatgtgtttttcttttttatcacattgtcaggctgcaaattttctgaactttaatgctccgcttcttcttgaaacataagttccaattccatatcatatctttgtgaatgaataaaacttaatgcttttaacagtacccaagtcacctcttgaacgctttgctgcttagaagtttcttctgccagatgccctaaattatctctctgaagttaaaagttacacagatctctagggtggggcaaaatgctgccagtctctttgctaaaacatagcaagagtcacctttacttcagttcccaacaagttccccatctccatctcagtccaccttaacctgcacttcattgtccatatcactatcagcattttcgtcaaaaccattcaacaagtgtctaggaagttccaaactttcccacatcttcctctcttcttctgagccctccaaactgttccaacctctccctgttatccagttccaaagttgcttccacagtttttgggtatctttacagcagcaccccactctactggcaccaatttactgtattagtacattttcatgttgctgaaaaagacatactcaaaattgggtaatttataaagaaaaagaggtttaatgggctcacagttccatgtggctggggagacctcacaatcatggcagaagataaaaggcacatcttacatggcagcagagaagagaaaatatgagagctaagcaaaaagggaaacccctataaaaccctcagatctcatgtggcttatttactaccacaagaatagaatgtcggaaactgcccccatgattcagttatctcccacctggtccctcccacaacatgtgggaactatgggagctacaattcaagatgagatttgggtggggaaacagccaaaccatatcattattaaaatcagtgtttagggggtgggtgcagtggctcatgcctgtaatcccagtattttgggaggccaaggcaggtggatcacttgagtccagaagttcgagaccagcctggcaacatggcataactctgtctctacaaaaaatacaaaaattagctaggcatggtggcgcacactttaatcccagctacttaacgaggctgaggcaccagaatcacttgagcctgggaggtcgaggttgcagtgagccaagatcatgctactgcactccagcctgggtgacagaatgagaccctgccacaaaacaaaatgaaatgaaaaacaaaaacaacaacaataaagtcagtgtgtaggtatttacatttcggtaatagactgctaatgattgatctttctattcttccttattttaaatgttggttattaataggaaatgcagtagttgtttttcttgtatagatttgtttttgttttgttaatctttaataacaaaggagttatttaaaatatcagtagttttattaaaaggactttttgatggatttaattatgcacaacaatatatgcagagttttttctttcagggttttagaaatgttatcagaagctctttattttttgcctcagtttatcttatacatctaggagacttcactcattggttgttaatttaattggctcatgttgagagacttacaaggaactttgttttattattgacttttttttttgtttgtaattctgagctctcattgctaaagggaggatcattttaaagccttacttaaacctctctttggtagcactttctagagtatgaaatttttttattttatttaatctgatttcagcatatcaaaggtatcttgcataacccatgagctgctgtatctcatgaatttatcctgtattggtgaactttcagagaatatatactgaagaacagttgtactttagaaagaaaagaacaagtattcattgtttaaaacctgaatctttctattttttacagtcagtggcttctaagtggaaaaatttttaatggaatttttacacattattatggattatacttgcagcttctcttcctgttcctttccactaatgaactttattttctaagttggaaaataaatagaattatgtacaaataattttatgactatagcaaatttattgtttattatgttccaaggttaggatgtgagaccagaagttagaaagcattaaatctatcatgtgaacaaaataattgagaagattagaaataatactaaagacactatttcctgtgttcctgcaatcttataaaaatatgattatagatttaggctgcagaatatgaatatgtgaaagatacttgtccactatacagagaagtaatgatggccccagctgcccatctggagtggctgctgcaaagatgctgcagtaggggaggcatggccagggctgtgtgctctatggagcaggtgggatctgggaacaggcaggagccccaccctcttccgagttggtggggttggagccccatgcttccaggagcagctgcagctatggacctgggcatccctatactcttgggggcccaggaagtccccctaccccagcaggcttggaagtgcctgctcctgctgtctggcctcaccctgctcacagtgcctgctctgggatggagcaaagctgtggccaagcctgggcactgttgtgacctggctgggtgtgcacacactcagggtggcgctgacatgccagccccctgccaccgcatccctttccagactttgggaccaaggagcactggagggaggccgacggggttgggctgagggtagctccgcatgggcctgcaggtgaccctccacagaaacagcctgtagatgacatgattggtggcagcaggaggcagacaggctcatgggtggaaaggggcaggtccccattgaagccctaccttcaagacagggacagcctacagcctcagggccgggctgtcagttcctggtggagttcacagtgggagtgaaaacttatggagctttttctgggcctgcccttggaccagtcagcacacacttccttccttctgagcccatgaaaaactccagacccagccagactcacacagacatcagactaccagctacaggaagaagctacccaatttgagtctctttgactccttgggatgatctgcctgcagaaaggagctacccactctgggtttcctgagtgctgttctgctgctcagtaaagctcctttctgccttcccaccctccagttgtttgtatacctcattcttcctggacacgggacaagaactcagggcctgccaaatggcaggactgaaaaaacagtaacacaaacagggctgaaatgtgcccaccctccacccccttcacgccccacattgtgggcaatgagaaggagagaagagctgtggccctttggggagcccacacctacaggctccctgagctaggctgtgaagccccatttgggagactgcagtttctggagtctccaagcttttgggtgccactggttcccctcctccagacacaggtgcccacagtggaagccacttgctgtgcatcagatccagccactggcttgcccagagccggtgcctgtgctggtgcctggagctgcccgccctgctacagcagccagtgtgcttggctgtgcgcagtggctggactccatgctcacttgttcatgcaccacttgctgctccgcatctgactcgtccttggcaggtgtgggatctgtgctggtagtgcatggtgagcgtggcccgccaggttgagtcagtggaatgagcccagcaggcctgagcaaaactcgggtaatggcgcaaccaatcacagaggtttctggctggaaaagtgacacacaaacaataagcgacagtagtgcttatctgcactagagacaaagtgttatgagctttttgacaaataaaaattatgcagcataaatacccagcatctgtgtctttatcgtgtcaggaattttcatgtataaggaagagtggttcaatctaattatgaatatccttggtaactatggttgccatcctatcaaagatgacttgctgtatggtgactatgtaaccagagtgttttgatatgctgtttctgtgggttgctggaaaacaattgcttttcccttattgatagaacagcaagagtaataatggtcccataagaatctatcttcatattcttaaaaaatggagtcatgataaaagaaggttggatttaaggaataactgtatacaaaatgtcaacagatttaggaatcacagcgctaatattttgtgtccataatgtaatcaaaacatatcaaatatgttacaaatatcctattatcttctgaacaaagcttgccctctgtttaaagatactgacattgaacatatcttagttgatcaaggtgaattttctgacaacatttacataaaattagaaatagagttgggctgctgaatatagaacatattttctttttgtttaaaatgaggatgacagtatatattcctgagctacaatggatcttaaacacctgccaccactaataccacagcaacaaaacaaaccaacaataaacaaacatgttgatttccttgtttgtattatggtagttactttgttcattcccatgtatctgatttttagtcttagatttttagtgtaatattttttaaaatttaaatatatgattgaagtttaatgtacatggggaaaagtacacaaatcatacatatagagtgagaaatttttatgaagtaaacataatccatgtttacagtatgtatccatgtttatctcctacccagataaagtagtaataccttgctgcctgcatcttggaagacgccctctctcagcgcgtcagaaagtcgcacatagtcaccacccagtagttctgatacatgccatcataaatcatacatagttgaaatcatactaattatactcttttggaaaaaactggcttcttcctctctttatgtttatggaattcaactctttacttgcatgtagcagtactttgttcattctccttccttcattgtatagctgtaccacaattaacctattcatttgattatttatttataaattacccagtctcaggtatttctttatagcactgctaaaacaacctaacacagaaactggatatataacatcaaggagaagaggtttattgggcccttggttatgcaggctgtacaggcatggtattagcatctgcttggcttccaggcaggcctcagagagcttttgctcatggcagaaggtgaaacagagcctgcatgtcacatgtggtgagagcaggagcaagagagagcaaggggaggtgccgtgcacttaaacaaccagatcttgtaagaactcattgtcgtcaggatggcaccaaggagatggtgctaaaccattcattggaaatatgctcccatgatccgatcacctcccactgggctctacctccaaaattgaggattacagttcaatatgaggtttggggggaacaaatacccaaactctatcatccagtgtttatatatgggtacataagtttctaaaattttagttttgttccatctatttgtttatgcttgtaccaatgccacattgtcttaattaatgtaaagagtacatacttgttaatgttcctagtgaagattaccttttttgttcttgactcttgcatgtcccataaagttcagaaccagtttttagtatctactacaaaaaatacctcctgggattgtttatttgagttacattaaatttttagactaatttgggaagaactgactctttataatatgaatctaccattaaagtgttacatacctttatttatgttttttatatctctgtgtatgggtgtatgttgatatttttgccttgctcatctattgttagctttatttctatttatttgggacttttagatagcattataaaaattaaatgtttaaagtttcattttctagttatatatagccaatataaaactacaactgatattttatatcaattttgtgttcagcaaccatgttcaattttcttatttcctatagtttaatctgtaaaatttttgtattttctacatataaagctatgtcataagcagacactgctttgtggttttcattgattcttctacgattatatacatttaaaagttttagtacatcttctattcttttagtacactagagcatattagacatataaaaagttaaaaaccatgaacaaatacagaaaatatatttttgaaatcacttataatcccttccacaagccagttattaaatttgtggcatctccagacattatagtttaacattggatcataaaggacaaaattttaaaaatactatttccatttagtagtatcccatgaacacttttccacgacaataaatatttttctgcacaaaattgttactagtgaacgtatttgttttcaaatattttgctcttataaacaacactgcatataaaagacttgtggatgggcctttggctgctatgtattttttggacataatttccttaggtgaaatccctagaagtagatgttcttagtcataatgtataggcttttgaaatttgtttccaaattgccttctagaagtgctgtgtaaattctcattcacaccagtagtatacagaagttcctgtttgcaaacaccctggcttctgttgatgttcaccctttgttgtatgaaatgtttttcattttttcctatcagttgaaactaaaaccctgtagccttttatgaactagtggtttcatgaaaatattttacctttttttttttaaaagaaatcattctcctcacactttctattttccattcttcttaccttttcttaaaattgcaggattttcaaattagaatatctaatacacttctccacatttacacaggagaaaacaagcctggaagattaagtgatttgtcaactactgaccagctgacacctttccagatttatttccctgcatctgattaatcccattgtctttgaaaagatactgtttttccaccgcatattctcactcataggtgggaattgaacaatgagatcacatggacacaggaaggggaatatcacactctggggactgtggtggggtcaggggaggggggagagatagcattgggagatatacctaatgctagatgacacattagtgggtgcagcgcaccagcatggcacatgtatacatatgtaactaacctgcacaatgtgcacatacatgtaccctaaaacttagagtataataaaaaaaaaaaaaaaaaaaagaaaagatactgtttttcaagactttaaagaggattactattgttttttggtagacagactagaactcattatctaataacaggattataacatagtcttatttatcatgttcttatctctcatgatattatatgaacagaactatcactttaacaaaaagtcattaatagatttctgtgtaatagataggtggtagtaagccatcaataaatggcagttcttactcttatttgaaataaaaagatcctgaaattatattattattacaggtgcatggctatccattggtcatgtattctattctttgtagattgacagttacttatacttgttcactgtattttaaaagcgattcagcctgcaacttaagtggtttataattgtaagggtcaatagaatatattgaaagatttttggattagtgaaaacttggagtttagttggcctttttattttctctctctctctctctctctctctctctctctctctgtctctctctctctctctctctctctctcttcccttttcttcttcccaggtctctgccagcaccctgaaatttctacatttgtaaaacaatttgctattgatattttctctcatttgcttcatctctaaaggaagaggtagtagaaaccaccactgtctttttgcagaagtttaaatggaggtgtgaaaattcatgctttctgggttcacttcctctcatatacctcagagaagaatggtagccacttagtcttaagaaagtttagagccttagtgcaacagtttagaataatctaatttttttgtttgtttttaaagactttgttgttgtactctatttctattcttcattcttgaaatccccttccccctacctctgttccccagccccacctcctacacaataatgggtgttttgctgaagtgatcaaatgagggttatctgttgcgcaaacactcatatatgaaaagttaacaaaatagtgccctggctccctaatccctattactaccactaattaagattccagtgaatgcctctttggatttgaggtttatcacaagtaatctgacaaagtttcatttacacaagtactgtggaaatgtagcttgtccttttgtaaattgttattatgaaggggtacattagactaaaattttcttaagttcatacatctcgtataactggctctgggaaatcactgagtgctcaaaagagttatgaattgaattcactgtaaatgctagattagaataatttttatagtaacagatgtggaagatgtctatttggcctttttaaaaaaactttatatgttatacacaaaataaatattgacaatttgaccactttacgttgtatactttatatacgaaacaaaaatgctttaacttcttcatacgaaaaataaaatttatactgttctgaagtcagtggttccctgatcatattttttttactctgagtatcatgatcaatgtcccttttgtgtgttgagtatttgaaactttaatttggaaaagaaaaatgtacttcttagacattagttttatggtaattataatgaagctggacataattgcatatttatacttcattgtaaatcaacagcttcctaatattcttaaaagtgttccttttttttttaaaaaaaacagcagcattttgttaaccttaatcagagcctgacgtgtgtttcttctaaatggcatctgatgtggtatctctcctcagttctctgtggtttcctgtttttttcatacatagagaaacactttttgaggtattaagcctcatatttttcttcttttaatggtacctgaaacctaaactctcttataaatacagcatagtgttgtcaacctgtctcaccattaatttatgccacttcccacagactgcttctctggaatccctccagcccttgctgtgtatccatcacccagctagcattgtccttacataccccactctagattctttagcattacaggttttacttctgtccctaaagtgtgatcttcagagacaaagatgttatctttatttctataattgtatttccccaacagtgccttgttttagcaatgaatagatatagtaggctctcaaagtgttgtctctagagcagcagcagcagcagcagcctcagggaacattttatggctgtcagtgttcaggccccaccccaatgctactgaatcataatatcttgggttgaggatcaggctatgttaacaagcccttcagataatttggatgcatgctgaagtttgacaaacactgctatagaaaattattgaatgaatatgaaagttgtacctttatggtgatatctcattgaagaggattgatatagcatggggccaggcacaatttagtttattctgcctgagtcttgtatttcagagatactggtaaaggaaacctaagatttaaatatttgctatcttataagaggatgttatcttataagagggacggcttttatgctattctgttgtaaaaattgtagtttaagttttaaaaactgaatgatttctttcttctgccgaattaggaataggcattattctgaagcaggaaggttaactaagaaatgcatcctgggtgtcactaattttcatggtgggaaagagggtaggtgagttggaaactggtcaggtggggataggttgagagacgtttccctagttaccattctgtgctcttctaaattttttgaatcatgtaactgcataacatgttaaaattttgtcgaatgatattcagtcagaataaagtaataaatattgaataaactcccatgatataaccattgtggttggtttaaaaattaagtttttcttttgtattaatatgaaaagttagataacgtatgtttttcatctctgcagaaaacatcagggttgtggcagaaatgtcttgatggctttctaccttagccttcttgaattggttgatacatattactcatttgtgcaatgaataaaggatttctattattatatggacccatcatcttatgactgtttttagaaaatgagaattaaatcttgattcattattaaataaccttgtatacacacatgaagaggtcatgacacataagactttgacctaataccttttttcagatatgtttctatagctatcttgatagcctaggactgtttgagagaaaattaatttaaatttttgtcatattcttagcaaatgcaaaataattgagttaaacagaacccactacatttgttctgaaatatgaacaatattctcaaatatttgtctggtagtacaaatacaattatattaattttattattgaattttgctgcttcaaagggaggtatttcttaaatgatacttgattcaattatttccctttttttccaccttgcacagaactatcgtaccatggaaagtattcagacagtgccttcatgaggtccaccagattagctctggcctggaagcaatggctctaaaatcaacaattgatttaacttgcaatgattacatttcagtttttgaatttgatatttttaccaggctgtttcaggtaagtttatacttgcttagtctatccattcccttcttctctctccctgtcttttctctctgtttctctctctctctgtctctctctcacacacacacacataaacaaacatatggaaaatagtgtcattcctattagtctgtaattttattggtatgtttggtcattgttaaaagtttagagtgagccatttggcttaagtttggagttatcagatgctgtgagcctggtggctgcttgttagctttgagaggatccatccaaaagagctttgttttaaactctctacttagtttcttactttattttgttgatcttttagcacaatgatggatagaatgcaacaactggaggtgggcatttgccacctagatctaaaatctttccctttgccttctgtgtttattaggtcaaaagggaaatagtaaacttagaaatatcagactgttctgtataggacagaactgtgtcctgtacttattttgtaaattgctttgcacattcaaccatgtgtaatgaacatttttcaaagtcaataaatattcttcatcagttcccttgtcatattcattcaaaatagtatgtcagtattaacaaagctctcttttgaaaaatttaggtcttttcccacattttctctaatgtaaacaactttaagatgaacatttttgttgtgcttattgtttttccctttaaattatcttccataattgttttcacatagcaaattagaagaaggtagcattatatggatactatcattttcttcttttgcgtgccttaatggaattatcttaaacatgaagacttgaaatttgtgttttgagattgactctgccactaaaatgtgtatcatctgtgggattcagttcaagtagtcacaaaataaaaattttctgcttaacatttttatgatttggtaacataaattatatagtaaatgaggtaaattgatcagactgggcttacttatgttctgatattattttttatcattttaatctgaagtaacattgattctctttgaaacatgctttcaacaaatatcagagtataatgttgatttcatgtttttcatgttacatgaacttctctgatttataattctgcttggcactagctagcaaggattggatgactggtttttgtaataaaaaccacaatgcacaggattagcttttaatttatgaaggaacccattattagaagagagattaactcctgtcaacagtacatataggatgtgaaaccccgcctctactaaaaatacaaaaaattagctgggcgtggtgatgagcacctgtagtcccagctacttgggaggctgaggcaggagaatggtgtgaacccgggaggcagagcttgcagtgagctgatatcgtgtcactgcactccagcctgggcaacagagcaagactctgtctcaaaaaaaaaaaaatacatataggatatatttcacttcattacaattacagaatcataattctaccttctatatagggtaagcaattacataaatcactgatgaaagtgtgcttttgattattttaaattttttaaattcgtgattattcccttggtgtatgtattacagtttgacagtttatgtttttttcaaagattttaagatatattttagaaaaaaaagttgtctgatattggtcattttataatggaacctctcctttctttaaaggtttctgataattttacagaatatcttatttatttaacatgatacaaagacattctaaatagtaagagctttgcttcttcaccttgtcaaggaagagagtaaaagtaatcttcctacattaaacctaactgctcattctaggaagtgagtatatttttttgtggtgagcctggatgactttttactgtgggtattaaatgctagaattccttgcagttatatattgaaagtatgagggcaacttaatgttggttaaacgattacctaaactgctatttagtatgtggacatattttcttataagctgttttactttaaaacagcacaagtcaaccttaatactctaaggaatatatatcttatttactttcactgggatgggaaaagaaagggctatttttaagtcaagctactgtgaaaagttttatatcataaaatgaaaatcttacctgggctagggaatgcctaatcattttaaaaacatgattacagaagcagctgaagaactcttgttagcccgtgtatttctgagattcatcattccatttatttctatgctgtaatcaaatgctttgaatataatcgtatgtgtgccttaaaatatgataaaattgattctgtttatagagaagtagatggtttaacttttgctgatcttttatttttataaaactttaaaaattaagtgattttcttaaatgtattatatttattaaatccttacatttatatattctgtatgaaaatatgttttgctaatactgtgtgactgcgggaacatacattcagctatagccatgatattagtagttaattggcagtgacttctgactaaattattgggagtggggtatttagcagaaagggaactgaaggtgagcaaggtacacttagaatttggggtctgaagtagagaaactagcagaagaaggagccagtgggggggcaggagatgaagttgagaattgcagagggaatgaaagaagtaaaaatgtttgcttcctcttggctttcattcttatatgcaggcagaacctgaacaaatacttgggagtcactggagggatcttactgtggtcaccttcctcatttcctcttcttccttctttccttctctttatccttctcttttctctcaaagtcacttagagatgctggaatcagcacatgctaatattagtcctggaaagaaattatagggattttgcttctcccttccttctccctggggctgttgttccccttttcctctatatccccactgttagaaaaaatggggtcactgagaaatggggcactacatttgggggtagcaggataaggacggagtattttagtagaatatcctattgactatggaatgtgtagcatcaatggaatagtgaggaaaatcaaagaagaggaaagtcctcagttgtagtaaagaattatagagagtgtctaggcagaccagccaaggaccctcttccaacttaagttgtaagtcagtaactggctcttcttgaaaatagtagcatttgggagaatggagggacttgtctcctttattcacttcattaatttctatagtcatttaaaagtatctagataattttatgttcttgtacacaaaaaaatttcttcaatctgaaaaacaaaataaaaaaaagttactctccaaagcactttgttttgccttttttaagccagtagttgtcgaaatactttaaaaagaaaaagcacataagtactacatgtttctgttttgaatgggctgcatacaaggaaaacaatacacagactcattctattacataaatatttttgcaattagaagctggccctctggattatgtactaagaaatggttgctgaatactgtagcagttggctcaaaactccaacttaatttttttacttgtattttgatctgtgcattggtgctctataaagtttagcattttttttcaaacactcttccactaatttgtgtggactttaatggaagtgacccaaatatttgtttggtatttctttcatccttgtccttcatagatgggtagaacaaaacaaaacaaaaactagggtctagaataacagttattgctcagttttttaaaatatatgctgacattttccaagtaatgtttaatgcagtttttagtcatgcattaggaagaaaattaaaaacatgcatttttttcaacctctcatattattattctctagagcgcctttcttgcccaattaggtattttagtgtgatggggaaataccccaaagatttttcttgttatgttgaaaaaggctaaaaaacttcattattactaaatcattctttgttatcctcatctcaagggatataatccttgcagaattctgccttgtaaatttgtaacttgcttaacaataatgaggaacaagtctcaaaacaaacaaaagcaggaactttctaccagtaatcatgtctaggatgactgctttaacagctttaacatggcaacgtaaaaatactttttttttcttttatgtagaagatttaataatctggcacatcagatagagtatgctgccagttccttggaataaatgtagcgtcagccttaaaaaaatcgcagagatgattcatccacacccttgagtaaagttgtctatcactgactgccttttttctcttgccctggtaactggagagacaactaatcagattaaagagagaatgatacagtggtacaaaccaaatacttctgtgaaaagttttgtttttatgtaactcacttttaaaccctaaacctttcctaagcttatagttctgtacagttaagccagatgtgactactgtagtgttaacactagccttttacacaagtcactatttagaggatctatctgttcaatgacaattatccctggctgattactattatctgacacttgcattggtcctggcatcccatgggtgagcaagacaggcatgtcccttgcccttatgtagcttatggttaatgtgtaacctttgccaagtcatgcaagttctatgatatggtttcttactgtgtaaaatgaagcagttgttaacagttaacagacatacagggaggtgaagaatatggcaagaggtaacaattttaaatacactggtcagagaaggcttcattgaggaagtgacatttggagacaggaatgagatggatatttgggggaagaaaattcaagtaaaggcatcggcaaatacaaagtctctgagggggaagagggcttttttgttcaagacaatagcaggctggagaagatgcagaaagtgggagagttatagcagatggagacaaaaaagggaactgctggggatcaaaccttgtaaagtccttctaagtgatatatgaggactttgacttttattcaaagttagaaggctttgaacaaaagaattatttcatttgtgttttacaatggtcacaagtgccgtagcgagaataggctgtgtagagaagagattttgtggttttcttttttgttctctgtattctcttcctgaaaaatctgttttctgcctaatcatatttctgtaaagaacaatagacttgaacgtctgctgttaagtaacaaaggttgacctaaaccacataaggtcagattaacttttaaaatatccaagataatgttaagtgtattaaatatggttcagtatgtaatcaaaatatttgatattctctagatactaatctcttttaatttttttattttttagccttggggctctattttgcggaattggaatttcttagctgtgacacatccaggttacatggcatttctcacatatgatgaagttaaagcacgactacagaaatatagcaccaaacccggaaggtaagactttttagcagtaatattatgtgatatatccaaagatgaaaaattctccatggtttgttcctaagtaagtcagcaatacccgctgatggcatgcttgggagggggctagaaaaggtaaaagaccaaaatggtgcttcttaacataatgttttaaattgatacattgtgcttactctgaaacttggtattcataaagtgaaaggggatatggtctcctttctgttttcatgatatccgtgtttatgtgcaaaattgaatgtatatatttgaatacttgaatactgtgctaaagaacaaataaatagaacagtcttatgttcattactttagggtatttttaagacattcatttaggctctctgataaatataagtacatatacatgcacatgaacacataaatatacatgtaagtttatgaacaaatacatgtatgtacataagcatatataaacctattgttataatcaaaaccaatttcgtgtccttgaaaacttttttcataatgcctcgtgttttattatagcctcagaatttatattttattttccacatgatgaaactaaatgagacttggagaggttggtcagcccctgtggctttggccaagaaattacaccttattaatggcaaatctggatccagaaaatctgtctcttccatggttcagtgcattttcccatgtatttcatctaaaaatgcattaggcccatagtaggcatttgtgctatggcaggcagtatgctgagtacggcagtagggatattagagacctgcttgtcagagtcctcacatttcagatgctattctggtattcattagtgctctgattttcatatagagaacattccattttagggatgaatttggtgctggtttttaagactgccttttttttctagtatcatttttatttggtttatggtgtatataatgtttgtactttataacatttttgttttgttttgttttgctttgtttttgagatggagtcttgctctgtcaccaggctggagtgcaatggcacaatctctgttcactgcaaccttcgactccctggttcgagcaattctcctgccttaacctcccaagtagctgggattacaggtgtgtgccaccacgcccagctattttttgtatttttagtagagatggggtttcaccatgttggtcaggatggtcttgatctcctgacctcgtgatctgcccaccttggtctcccaaagtgctgggattacaggcgtgagccaccatgcctggccaaaacagttttttttttaagtgcaagccaatagtgctgattttttcttctctgccattatgaaaatttccatatttttgtctttttaagaatttatatagtgtatttgaaaaaggagctagtgaatacaaaaacagtttggcttccactgaaatcttctatttagactaaggagagttagttctcattgtaaccatgagagaaggtcagttattttgcatattgacagtggtttagatgaatgattttctttcattcaagaatctctcatgaccagatttttccatagtttttactctcttgaatgacatcatataaagtatctttcttgctcttggcgtatgatgtgaaaaatgtgttgtggttggaattatgcagtcatacaaaatttaacatgtgagttatttgataaattttcttgtccaatcatagaaataatgagggaactgaggcctttatttttggttttgttttcttgttcagtatcatggagaacatgaattacaatattgagaacaacagccaggtctcattactatttggaaaagttctcttagtaaaaaactactgccctctgataagaatatcataagacccaccagtaaacttatcttcaaatgtgtacaatatatacattttatacagcttttttgtatatcagtcataccttaaaaaactagaataatgtcctctgagaaaaaaatccttctttccttcctaacttgccatgtaatgattttttctactaaattttaggtagctaatgatgaaataaataatatataacaaattataatgtgtaaagtatgacatgggtactaaagatgtgtttaggaaaacacccttaatgaataaaaaaaaaactgtaacaaatatttgctttggagaatatctgtgtttaacattttttttttttttatcttggaaagtatttcatgtctttgacttcatagtatagaaaacaattggatttacttcaaggacattttggctccttaggttgtgctttattattggggatccatctgacaaaatatgagttatggggtgaaggtagtaacatttggaaatctaagtgaagtattcattaggtgacaagagtggcattgaaccctaaaccacctcgtcaacatgaaagatacttcattttatatgcatatatatatttttttttaatttttttttttttttgagacagagtctcactgtgttcacccagcaggagtgcagtggtactatctgggctcactgtaagctccacctcctgggttcaaacgattctcatgcctcagcctcctgagtagctgggactacaggcatgtaccatcatgccttgccaatttttttgtatttttagtggagacgggttttcgccatgttggccatggtggcctcgaactcctggcctcaaatgatccaccttgctcagtctcccaacgtgctgggattacaggtgtgagccaccactcctggccccaatttgattaaatgaagcatgttgtttaagagagcaaggtgctaaaaataagccaaaaattcacttgaggttgggaaggggtagccaccagccaaagggtcagcagcaaattaaatggaataggaaaaaggtgcatgagaggaagaaattgttctaaaatgcccttggctcttaccagattgctggtattactatctcttatatacatgaattgcttgaaccttctgtataataatgagttttagaaacaccatcccaaaacaatgtttagagcaacagagaaggacatgaattaaaaatgtgagcaatttcacaagtatgtatttcagtatctactagattcttactatatgaataaatttggaattacatttaaaattactagcaatgcagatgtgtaattattttcttcatgttaatacactgtaaactttgctgagattcatagtacacagatttttaagattttaacttttgacttaatttgaaggaattttatcattaatttttttatgtaacattttaataatgtccttctgaattataatttatagtgactttctattatttttggcacttctcataatatcatagccgtaggtctctgtggcattattttatctgattttgattaagaatgccaatagttgacagattgatatcctattttcagtttctctagggatatatgtttttagacttttttgaaaagttctttccaaagattctatcaccaatataaagtttttaatatttaaaaatcacttctttttttaaattctagtttgtccaaagatgaaattacactctactactaaatatacaagttaattaaatccagtgactgcagccattatgtatgttaaagtatatctttcaagttacatttatagtgcttggtctatcaatgactaaagtatattttgacatacttgtgtctgccacatacatacagcagctcgaatattaaaatatagccaacagatttaagttggtttgtttttgatctgcttaatgggtaataaaatccagaaggatatcctgatagaaagattgaatgcagtacactcaaataaagagaaatgatctaaaatgaaataagtacatagatagctaaatgaatacataaatgataatgatggatttaaagccaagttgctgcctccttttgttggatattagtttcaagggacttgatttgatttatatttttgaactatcttaacttccccttgtaagatactgaatttgacatggttagatggcaggcatgaaattacctagtttgcacttttgagctttagggatgaatggcaggaatacctgaaagaaaagttactatttttttaacagttggccgggtgcggtggctcacgcctgtaatcccagcactttgggatgccgaggcgggtggatcatgaggtcaggatatcgagaccatcctggctaacgtggtctctattaaaaatacaaaaaattggccaggcgcggtggctcatgcctgtaatcccagcactttgggaggccaaggcgggcagatcaccaggtcaggagatcgagaccatcctggctaacacggtgaaccccatctctactaaaaatacaaaaaaattagctgggtgtggtggcgggcacctgtggtcccagctactcgggaggctgaagcaggagaatagcgtgaacctgggaggcggagcttgcagtgagccgtgattgcgccactgcactccagcatgggcgacagagcaagactctgtctcaaaaacaaaacaagcaacaacaacaacaaaataacaacaacaacaaaaatacaaaaaattagctgggcgtcgtggcacacgcctgtagtcccagctactcaggaggctgaggcaggagaatcgcttgaacctgggaggcggaggttgcagtgagccgagatggcgccactgcactacagcctgggtgatagagtgagactgcgtctcaaaaaaaacaaacaaactaattttaatgtctaaattacaaaggaatatatcgaattctaagcctgggtgacagagtaagactccgtctcaaaaaaaaaaaaaaaaaaaaaaccctaatttttatgtctaaattacaaaggaatatattgagttctacagtagaaactggctcagtttttgtctgaggtaggcaaattaaatttaaatttttacttatttattttatttttacattccaagagtgatttattttgtagctattccatgccatcagcatttccatacaccgcatcctgatgatgatggtaaaaaaatccctagtttacaatcttgtttattttcttatatatgtatctggaagtatttaaataaaaagaaatgatcagtgtttctcttgtaaattgataaatggagaagtacattgttgctaaaaataagttagaagacagaatatgaggagtattcaggaattctaaatgattgtttattcttttgcttggaagaaacctaacaaattgtttagtattgatttatattctgaatgtaattagatgtaattttcttatgttttgcagctatattttccggttaagttgcactcgattgggacagtgggccattggctatgtgactggggatgggaatatcttacagaccatacctcataacaagcccttatttcaagccctgattgatggcagcagggaaggattgtaagtatgagaaatggaagttggagtgcttatgattcatgaatttgaaaaataaagattgctttgtgatggcgaaaatggatagcaaggctgctttttatgttaagactgagaaataatggatgttccttagttttttgttcatctttttatataatcattttaaggtaacctaattatttgaaactatgttatagcaaatacatttcaacttcaaattacaacatgaatttttatctttcatatgataaaaacttgggacttaaaggtagttttaaaatggatgtaaaactgtttatatattaagagaaaattatttagaataattgacttctgtttcttcatataacccttagaatactagtttcactttttctttcttttttttttttgagatggagtctaactctgttgccaggctggagtgcagtggcacaatctctgctcactgcaacctccgcctcctgggttcaagggattcccctgcctcagcctcccaagtggctgggactacaggcgtgcgccaccatgccctgctagttttttgtattttagtagagacggggtttcaccgtgttagccaggatggcctcaatttcctgacctcatgatccacccgcctcggcctcccaaagtgctgggattacaggcatgagccactgtgcccagccagtttcactttttttattttgattgttagtgccagattttcttttctctttcttatctgtttctccctccaccccttttcttttctctctgtagatctttcctttttcacactaataataactccatattcaggactatatgttaatagctaagtttagtttatctcaagctattcctttttaaaatttaaaaataagttaagtttccctttgttttttagattaataatgaattctcccccactcactccacacacaaagtatggacaatctgttgggccccttcatagtaaatatgtctgattcttcttatttgttttattcacatgcctttccctttgtcctctccttgtattctcagtgcacttgatcatgctgctttttcttcccctctgccttgctggataacttagagatgctcgtgatcaaactcgctgcagtatgaattctggtagaaacctagaaggaaaaagtccaccagagttaacaaagagcaaatgatttgagttttacctttatcaaagtaattgcaaaaaagaaagaaagaaaagaaaaaaagtgatgagatttatacaaagaaaaattaggaatttctaaaaacctatgagcttttgggtgggagtggtggcttacgcctgtaatcccagcattttgggaggccaaggcaggaggatcacttgagcccaggagttcgaggtcaggctgggcaacatggcaaaaccctagctctacaaaaaatgcaaaaaaattagctgggcatggtggcgcgtgacggtagtcctcgctactctggaggctaagatgggttaatcacctgagcctgggaagttgaggctacagtgacaacatcgtgccactgcactccagcctgtgcatcagagtgagaccttatctgaaaaaataataataataccaacacacacaaaacctttcaataaattaattacatagtaattgtatggcaagttatggtaccaaatgtgtatttctctttctttttccttctaattttcataaatttgctagtgtcggttatttatacctttcttctaatgcatcaaagctttgtgtatagattttgatttaccatgattacagattttttttaagaaaatatactttaaagtttgaatttataagtagaacctatcaacaacctcctgataggttaaaaagaacctttaacctttcctatggtaccctaatcatgatttttgtaatctttaatttctgaattcttgctagaatttcttcatattatttgaaatgtgatacataaaattttatataatatttttttaaatggccaatttttagggtatataaaaaagttgcttattcttctttggattatcattcctcatttaatgtttgtcaaattttgtaacacacccataaggacattctaaatttgtatcatactcagatgtagtaaactccttttgctaaatcataaaaaaatcatctcactgatttgtcccttactatgtaagaattatctgtcctttaagttcatttttctggttttcctgggtaaattctaacacttaacatgtttgtagactcctcattcgaggataaatattttttgttattttaaagaatagatttgttatagttttaccctttaaaatatacatactacagtactatattcttattgttttatttaagaaatttagtatagaaagatgttaaacagaactaaccataatttaataaactgatgaaatacagcagtgacattaccacttttttcaattaaaaataagtatttaccaacacagtaaattttattttttaatgaatttttcaataacaagtacaacttctgatttaacacagcaagaatgcattattactacaacttttagttcagatttcagttttccctgataatagaaccttgtatctatagaccattttgtgtttgtagtgttaagtcaatgaaacatggaaacgtaacattttctaattttttaaaatgtgtatgtgcctgtgtgtctgtgtgtttgcatatgtgcacatgtgtttgtgttaggtgaggggaagatgggagaagagatatggaaactgtagaaacaggaataccacagaagtgtttgagtaacttacaagaaaactgtggcctttaattatatttttctttccatgtggtattaggcatggtgtaaaatgataccattattacctgtgcctcagatgaaggatgtaatagttgcaaataggtatatcttcaaagtgttttggaatacaacatgattgaccagtgaaataaattcttaacttatataagagacatatattaaaggtatttcattgaaaatggttgcttagtgggttaggctatattcattatgtatttcttatatgaaaattctacattttaagtgtcctaaaaacaacatagtaatttggaaacattgaagtaatatgttattgatatgttacatgaaaaggaaacatccaaatgtatgtttgaatatagaaaaatttgattaaatatccttaaatgcaattaaaacttgtatatttaaggtaataaagtttctgtttaaattcagttatctttatcctgatgggaggagttataatcctgatttaactggattatgtgaacctacacctcatgaccatataaaagttacacaggtaaggataattgctagaaaagtataattaaataagtatccataatgcccttgaaataaataagactctcttagtgtagttaaaatcatgcacaggtatttaatacaaaatatacttaaggaattctaagagtgtttaaggagaaattatattactttcttagattttttgatacaaatttatgctgttaaaattcttgctttccatatagtattggcatttatatgggggaaataaataaatccataagcaagtaggtggatgtaaggagagagccatagtttagaaagctaccaaaaaaagattagaataattatatgccttagattttagagtcaaatgggtaattgaagcctgttgaagataacaattatgtttttctaaatccattgctggcagcctcatagcttatgaataggaatgtaagttggtaaaacctttcttgagagtgatattcagtgattataaaaatctaagtgaaaatatcttttcactttaaattctatatatgtaatagatcccatatatatcacttacacatgcacacaaaaatctatacaacaggtatttactgtaatattttttgtaaaagcgaaaaattacaaaatactaagaactttagtaatagattaaataaaatagactactgttctcatactgtattgtgtgaagtcatgaacaggagggaggtagctctacatactcacatgggaacttctgcatcttgtactgtaaaataattccatttatgtaaagtacatgtaggtaacatttcatttggtcaagttgcattatgtacgttcaacttctgtaaggaaataattaattaattgctgtatatgaacatgtgagtatagtttttaaaagatcaaaaaaacaccaaactggtaagaagatttaactgaggaggtgaaaagggattgagcagtgagggaggggatgaagggagaacttgaatattttattttatattcagtctagttttaaaatattttatatttgagatatgttcacgccttgtgtaataagtaataaaaatctaagggaaaaaacaagagaagaattacagctttttttaagacagtagataataatttaccttataattctccagatttcctttcccatggtctttacattattatgtgagacatacacattgacatttatatgtacatattgtacgtgtaaatttaataaatgattgccttgtttttctttttttgagacagagtcttgctttgtcgcccaggctggagtgcagtgacgcgatctcggctcactacaacctctgccctctgggttcgagctgttctcttgcctcagcctcccgagtagctggcattacaggtgcctgccaccacttccggctaatttttgtatttttagtagagatggggtttctccatgttggtcaggatcaaactcctgacctcaggtgatccacccgcctcgccctcccaaagtgctgggattacaggcgtgagccaccatgcccggccatgattgccattttaaatttaatatatgattgccattttaaaagttatgtggtgatcctgtattttcaaatatgtgtgaaaggatacttaggaaagacagttcctctttataaagccattaaaaaaataaatctttggaagtaataacatccccttaaattactcataaatactcttactgtttaggttgcattgagatctgcatctttgattttagcttaatgtaattttttttataattgcatatttttcctttggacagtcataaccagtatcaatacttatctattatttcagggacatcagcaatttataacttactttgaattactttagttttatttcttctccatttttatgcattctctcgtctctttccttaagttccccacaaaatttttgtatattcacacatcataatagacacagtttatgtgtacatgtgtgtacctgcatgtacatgcatatgtatccatgtatgtttatgtatatgtatatttttctcaccaggattataatatattttagtagtctgtggactaaatattattatttatttatcctactccgtgccaggcacattgtagtcacttactgaactaaaagttgctttatttacccaaatattggtttcataattccttttctttgtattcctaacatcttttttcattatttaccaatttatttgtattttttcaaatttaccaatttatttgtatttttgtcacgaagatcttttcagtatttgaattttgaaaattttactgtgtcaaatgttttaagctaaaaacccaatcaatcaagaacattgcagttttaataaaatggtttttggttactgaagtgatttgttttcttgacagtgttagggaaagcgtatgcactttttagtcagaggcttaatttagagtttgaagcaaacaagttaaactgattaagccccaggcctaacttttgttaagttcaatatatcttcttgtgctttggagatgaagtgaaatagtaagtgtggaccacagtgcctggcatgcgggaagtgcttggtaaatgtttgtcacttttcttgcattcagggatttctaaagatattgaaacagtaaaatttaatgtttagccaagtatcatttttttttcaatttgacagttaaattatatgagcatgtggcatttataaaaaagataaagtcattttatattcctattttaaaaccatagattttgtcttttgagtcaccatgactattgaagcaagtcccttcctaaaggaacagtaaaggaaccttaaataatatgaatcattaagaagcatgtaagatagatgataaaagttcaaacctttttaaaatgaattttgtagaccaaattgtgattatcaattcaaaacatgtctcaaatggtaacaaaattctgacaaggtcaattgtgagatattgactgtgcgtcattttatttgggaaaatttgatactaacaatttgtgctggaaatacattaacattactttctccctcctccccaaattccaggaacaatatgaattatattgtgaaatgggctccacttttcagctctgtaagatttgtgcagagaatgacaaagatgtcaagattgagccttgtgggcatttgatgtgcacctcttgccttacggcatggcaggtataatcattagcaacatggatgtctttcttatatgtcctactaatatttctcttttcagttttcttaatggtttaggaagtaatgctggtaagtgctttgtttgaaatgattgtgtaaagattttatatgtttgagttgctatatataatttgatttttaactatcttatattttatctttaaatgtataaattttattatattagtcatcagtagttctacttctgtagtaccatggatttcagtatgttcacttataggtattaccaactagacatttttatgccatttattgataggtcagaatctgtttgtagtaggtcagtttctgaagccaagtaaaccatagtagataaatcttattttgatattttcaagcaaacttctttactcctgaggaggcatggttcctgtctcacatatgctccgtagtgctgaaattggagaatcagacaggaagtatctctcaaacacttatagttcccacagaaacaggcattaaagttccctatttactgaagcataatctcaggcaaattgccttcccatctgccgcaggcattcaataaatataaattgatttgaagttttataggaaggtctggagaataactggttttcccaaggactttccttttttttttttttttgagacagagtcttgctctgtcgcccaggctggagtgcagtggcacgatctcggcacacagcaagctccgcctcctgggttcacgccattctcctgcctcagcctcccgagtagctgggtctacaggtgcccgccaccgtgcccagctaattttttgtatttttagtagagacggggtttcaccatgttagccaggatggtctcgatctcctgaccttgtgatccacctgccacggcctcccaaagtgctgggattacaggtgtgagcccaagggctttcttatatttcttcatctgtaacaaagattggggatttttaaaatggatctttggacagatttccagttttgagtatttggaggagtcatggaatattttgatcaagccattttgaaactgtttgacatagttatattgaagttagaagtatattgatagggtttagaaagcaaataattaaattttctagtctttaaaaaagattttcggtgaagcataaagttgacattcctaccctatttctaagccctctcagtccttgattttctttgtccaaccctgcatctctgcatgagttgaggaaggatggacattgaggctcatggaagggggctgacagactcagaggggcattgatgcctgccgagctccttacttagtaataaaatataatgattttcccattttcatagtcataaaagggcctgcttcttcttttgtgaatatttttttaatggatgaggaaaagaggaagaattaggaaatgaattacagttgatttatattttcaaagtcctttctgaatgcccagagatctttgctacctcagtaacgttgttcaaaatccctatacttctcttcttcatatgcatttggcttatattttgttttacgtttttctttatatcctctcccttatttccttttatcccttcatgatgttggcgaaatttgcatattacagggagatgttgaaggagatcattctcaacatagatacttgattcctatttaaattacattaacagtaatagttctgcaaacttagcagtgccttttaaactacattcaataaatgtagatatgttggtagaagacagaattgtttgcaagtttatttcaaatgtgtcagtaggaggtattatagagatattgactcagtgatagattgtctgtaattggactacttaggattggtgtacctgataatcattcagtgtttcaggatacgtgttaaactaacaaagaaaacaaattgtatttgtcacccttctttgccttcagggtggtagtgtggtttttacaagtacaaagaaactaaaagccttgcatttctccctgaagaaaatcagaataataggctgatacaaattcctaacactctgcctccatgcagggcttgtgtatttcagccatttttcttggggctccagtcttagagcatacacatgcatacatgttgcaagacttcacatctgtaactcaatactgtgcttagtatttggaggttaagttggttaaaagtcagaagctgctatgagtttgacagaaacatttgtttagtaaaatgttttgttcaaagcatcatacaaaatagtttactggccaggcatggcggctcacacctcttaaatcccagtactttgggaggctgagacaggaagatcccctgagcccaggagttcgagaacagcctggacaacataaggagaccccgtctctataaagtaataataataataataaaatagttgtttgccttgcagcccagggtgagtagaaaagtatggctgaatataaagcaacaaatatttattttactttctatatacttcttaaaagaaagtttattcttagtaaataaatactacctttacttaagtcctaacttcacattgtcagtacattcttggaaactgcaactttgagcaaagtgacatactgtatgctgtaggaaccttaactcttgtttctatcaattagcctagggtaaaatggatttcattatacagtaagttgtttcacttaaagtctcaatttccaagaactaattaacaatattaattgaggacttactgtatttatttgttaggtttgtgaactatttgcagtaggttcattatgtgcaaaaggcataggaacatttcccagttgtctttctgtattactaatgctgtgtaatcaccacaacattttacatcaccacaacatgtctatgtgttactgtgcattctccaaattggtgtagttcctcttgcttgttgcttatcaattccttgaattatttcatgattttttatattggcctaatgaccttatatgaagatatgttcagtaatgttagtaagttgttaacatttactatttctctttttcattctcagctacttctcagttttacttttataaattgaggaagtacataattgtcaagctctgaaaattgtgtttagctaaaattttaaaagttatgtgagagtaatagtttactaagtaaagtagaaacaaaaatgacaaattcaaaactattcagaaggttgaaataataaattacatttatgttactagacagtaatgttattgtcttaatctgatcattgaattttgcacctaaattaatgaaaaatatgcaaacctttattttcagtattgtttttgaattctcctcacacaaagcagctcatcattaataagcatcctcctgatacattttgtatatgtttctgtaagctcttacctcattatgttcatattgtaaatatttccatatttatgtattttctttctagaatgtggattactttacctattttagaatctctctgctagcatgttatctgcacattggtcattacgcagtaaatacttatagattgcatgctaggtaatgtaaaagaaaaggaagtctaaaagtacattaaataaaaagacagtattgtaggttgtgaaaagctcttacaatacttttctgagaattatttatgatcttttcaaagaccttttatcatacttagtatctgagaacgaatcctagaatatctaaggcttagttccctttgttccattcactagctattgtgtgatttccttaacattttacattgtgatttttttccacccattcttgaaccatgttattttacgtttattgtatgcagtactaccagcactaacacagaagcagtaagactgcatttttatcgctgttttacaccaaaaaaaaaatatgcacagtaatccccggttcatgttttctctccccctaaagaaaattattcttaggtcaataattctaaattgatatttcacagtctctgtatctcagtgggatcttactggtcaaaggaagtttcaacttttgaacatttctacttttggataatctaaatatttttacatttagatacagtcttcacgtagtgcttcctgccaactagcgtatctgttttggcagcttttgtattattgcatgaacaggaatgtttgttgatcattaaaatatgttattgcaaaatgcctctggtatttaataaaaataaaagtcctataaagttaatctagttaaagcacagttgtaaaacattagatatgctgaaggtctcgtatctgtaatctcacctagctgtgctcacttgacttaacctaattgatgataaatatgtcagtaagaagaacaaaattatagcacacttcatagttccacaaaatattgccaaaagtggtatctaagcttgtacatatatagagaaatgttctcaaggtattaggtgtctggacttagattaaaataacttacgtctctcttgttcaattttttcctcattcaaaaatggtaccttaaagacattgtttttgttttatatgattaaatttgcaagcttaactgtgcacaggaagaatttgttattttgcttcttcctcttactggtttggtagaagcaaaccaagatggtttcaactatcattttccatttatttatttatttaggaaacattctttgagcagctgcaatatcccatgttctgtagtatgctctgaactgaaaagaactctgagacacaatccttagctccaagaagttaaagttaaaattaaacctgaaatttctattaaggggcatggtgttaataattacttaaaatgagtatcctgttatccttcaaatttaattatggctgctagacattttttcttactttctactacgttggttgggcatgctgatatgaacatgattttaaaggctgcgtgtctgccaagaagctatgataaatcagttagaatccaataggaaatattaaaccctgaccataaatcatactctgctcagcagtgtgcatttttagcaagtcattcttcaccaacttttccttccatctgatgccctactttggtttaattgaaattcattagagacttaaattttatgtaattaacagaaaacttaagaaatgcgcagtagctgtgtcagtagttataggctgcaagtggttactctttaattgctgtcataatggcccattagtcatgcctctgaagaggtgtcagatgcttttttctctttctgaaacatctgtgttatttaataaattgaataagcaagcagagtttgcacagaatactaagtaagttgaataatcacctttctagagacattctttgaagtaatactactctgtgtgcaacatttttgtgctacccttagtaataaaacttggagagttgtctttcacatccacgtgttaatgggacattaacaaaacgtttatcttctcaaccctgaacttctgcacatcttcctttgtgaggtagtatattatgcagcagtgattctgcagcattaccatgtaaggttaaaagttaaggaattgttttcattctgtgcttatttcaggaatctagaaaatggcttttgatttgtagttctccttgaagaggttcttcacatcccttgtaagttgtatttctaggtattttattctctttgtagcagttgtgaatgggagttcactcatgatttggctctctgtttgtctattattggtgcataggaatgtttgttatttttgcacatagattttatatcctgagactttgctgaagctgcttatcagctttaggagattttgggctgagacgacggggttttctaaatatacattcatgtcatctgcaaacagagaggacataaagaaagaatcaatatcatgaaaatggccaaaatgcccaaagtaatttatagattcaatctatccccatcaaactaccattgactttcttcacagacttagaaaaaactactttaaatttcatatggaaccaaaaaagagctcgtataaccaagacaatcctaagcaaaaagaaaaaagctggaggcatcacgctacctgacttcaaactatactgcaaggctacagtaaccaaaacagcatggtactggtaccaaaacagatatctagaccaatggaacagaatagatgcctcagaaataatgcgacacatctacaaccatctgatctttgataaacctgacaacaacaaacaatggggaaaggattccctatttaataaacggtgttgggaaaactggctagccatacgcagaaaactgaaactggaccccttccttatatcttatacaaaaattaactcaagacggattaaagacttaaatgtaagacataaaaccgtaaaaaccctagaagaaaacctaggcaataccattcagtacataggcatgggcaaagacttcatgactaaaacactaaaagcaatggcaacaaaagccaaaatagacaaatgagatctaattaaagagcttctgtacagcaaaagaaactgtcgtcagagtgaacagacaacctacagaatgagggaaaatttttacagtttatccatctgacaaagggctaacatccataatctacaaggaacttaaacaaatttccaagaaaaaaaaacaaagtcaaaaagtgggcgaagcatatgaacaaacacttctcaaaagaagacatttatgcagccagcaaacatgaaaaaaagctcatcatcacttgtcattagagaaatgcaaatcaaaaccacaatgagataaccatctcacgccagttagaatggcgatcattgaaaagtcaggaaacaacagatgctggagaggatgtggagaaataggagtgcttttacactgttgatgagagtgtaaattagttcaaccattgtggaagatggtgtggtgattcctcaaggatctagagtcagaaataccatttgacccagcaatcccattactgggtatatactcaaaggattataaatcattgtcctaaaaagacacattcacatgtatgtttattgtagcactgttcacaagagcaaagacttggaaccaacccaaatgtccatctatgatagactggataaagaaaatgtggcacatatacaccatggaatactatgcagccataaaaaaggatgagttcatgtcctttgcagggacatggttgaagctggaagccatcattctcagcaaactaacacaagaacagaaaagccaacactgcatgttctcactcataagtggaagttgaacattgagaacacatggacccaggaggggaacatcacacaccagggtctgtcagcggctggggggcaaggggagggatagctttaggagacatacctaatgtagatgactggttgataggtgcagctaaccaccatggcatgtgtatacctgtgtaacaaacctgcatgttctgcacatgtatcccagaacttttaaagtataataaaagaaaaaaaaaaaaaaggaaaatggcttttgagctcctgaatggaacaaaccccaaactgtgttcttcatatcttccttccaaaataaaaatgtatatctttgtcagttggatatgcagctatgttttgaattactgccaaggactttaattcaattaaatgtaaaattaattttcctgtggttattcttcctgtatattgtttgatataatttaaaagaaagatatcagcgtattcaaaatagtaatttacaaaaaaatcaataaactctgattttaatgtggaatatgattaaggagatttatagatgttccatatgtagagagtgttgttgggaaaatgtatatagttgtctgagagaggtgagaaacaagttcaaatgatcacttttaaggcaataagaaataatctttggccaggcgcggttgctcacacctgtaatcccagcactttgagaagccgaggtgggtggatcacatgaggtcagcagttcaagaccagcctagccaacatggcgaaccctgtttctactaaaaataccaaataactgggcgtggtggcgggagcctgtaatcccagcagcttgggaggctgaggcacaggtgaatggcctgaaccctagaggcagaggtttcagtgagctgagatcacggcactgcaccccagcctaggtaacagagtgagattctgtctcaaagagtaaaaaaaaaagataaaataaaataaatgttttactctatcttccttcaaaggcgaccagtcttcacatttctagcctcagtgaaattttataacttaggtactacaaatagaaaataatacttgcctttacgaacgttttaaattggcacttttgtctttaaccacccgttgtgtcttttgtgtaaatgagtgattaaatgttggagcttccctttcacgttgggagtaataaagaagctgcgagagttgtccaaacacgttatagtaacattatgaactagagcgatgcactagaaaaggaaaggaactgatggatatgagaaaataaaatctggtagaataagtgcttgattcttaagtctaatgactaaattagatggatgcccactatattgtagagtgtgtggaccgtaacagatactggcactttggaaacattttcagttgactccaacatggatcttttataggtgtttttaaagttgacaccatttttaaaaagtgtttagaatgtagactcattctaaatgaccagctcattctagaccaacttcatgcattaaaattttaaattggattcaagcaacaaatgtttaaaacaaaaagcttttactatgtaaaaacgtgtcctcagaaatggtataattattcagatacattttatgtcttcctgttaaagagctgaaacttttcaattagagcgaacagaatattcattgattgtagtagtttttttaattttgatatttgcaatttgaacaaaatagttttaaattttttacatttatgaatgatcagtagtagcaaccggctatttttcacctttattttaaccttgactatgaatctgagattgaaaaaccactacatgctgatcctatagtgtagtgttgaaatgattagactcttgaaatagatccccttgttgtgatttcctacttagtattttttgctatgtgaccttcatcaaactagtaaacccctttttcttgttggggaacaataattgtacctaccttataggattaaatgaattaatatttagagagtgcttacaacagtgcctggaattttagttattattgtttctaataaagtgcttaggagatatctcatatttccagttatgattaatctatgcacattgataattctgcaggtttaaaattgtattcattacattacaaaatggaattcgtatagagatacgagttttttcaaaagttaagatatgtttccttagttttcttattatatttattcttgagactatttttatactaattatgccaactggaatttttatagcactttataaagctttaaactaatttatctcattttatctttatggtgtctctaaatgtgcattatctcattatgccctgtaaataagatgcaatgaattgcccagtgtcacacagctgtaattggggaaggtagaagtccagtccaagtatcctaattcagaatgtctgtgctccttttctgatttactatgcaggcttttatgggcatcccaaatcaaaactaaaagagtctagattcaccaatgtcttttttccttgtccatcataataaaccagaaccaaagatctctcctgctctggggcattttgtctaagattactattaactatccttccttattctttcattcgttctttcagccagaagttattgagtttctgtgggagatactgtgctttgaaaattcttggtatggatccaacctattctcagtgcatttatatacatataatttttccagttataattgctatgtttaaaaaaagatttgtggcaacctcatagctacatgaaatatagcaaggtaatataaattagaagttattgataaaggaaaaaatacatacatatgcatacacatacagtaaaaatataaaatgcactccaaaatgagacttaggaggccctatgtatataccctacagcccttgatgtatattacatatgtgggaaggcataaagtgattgaccttaagtcaaagtatgcctctaataatcatgctgagagcaaataatttatactatatataatgctatcttgaaaaacatttaaaagaaggtatttaagatatagtatgtctgtcttagcaatatttaaacaaagtatggaaggtgattgatacatgatgatgatgagatggtactaacaatattcatttgggtttttacatagagtatttgtggagaatgtagtattatgaaggtttaaaatttttttctatttgtttgtcaatgttaattatctgagtttacctaaagttatattttaagtaatgtcactgacttacagtattaatggttgaaatgtgagtctgaattattttactgtattatgagaaatgacagaatttagtttcagctgtgtatagtattcactgataacttctgtatcctttggtttagaagtatttcttattcgaggaagtgaaacctactgagtcatttagaatagacggagtcctcagtacttcctcttaacattcacagaatggtggaaactagaaaatgagttatttattggtctttattctccattaatgcatattatttgatcttgcattaagtatacattgacagaaacattattttaattattgtattgaagacattcttcatgtgtatttaatcaaccacctgacagaaactagggcagagtaaccaaagtaacatttgagactttatggttagacgtctaatttgcatgtgacagtagtccatttataaagtgtgatggatgaagtcatattagagtaagtaccattagagacacattcattgtgatctgtgtttttgcaaatcaaaattaatggtcattgcagctgtttgttgatctgttgagtaatgtaaactctcaacaacaaagctgaagagaagatgtattttgtgatatctactcttataacaggcactcttaacaacatcagtaatttgtataacattaaatgttcaagtagcatagagaaaaatctaaattcagttttagatgaacagttctttgttttttcttgtgctataaagacacagttattgcctttcacctcctcccccttcaaaactcaatattttcagttatctcttgtgaggaaatatatcacataaactggaagtcatccttaaccagagcaatatgtaagttgaccctggaggttcaaagagaaacttacgtagcctaatagtgtggcttgcacattctatgcactgtactaaaaaataatgtaactttcatgatttcgattgggtggaataatttttagttacgattaggtctttaaaaggttcttggtttttagttatgatactaaaatatttaccagtgaatttatatgatgtgtaggaggtacttcaaaacgatctaagagtgaaaggaacaagagaacatatagatgaaactggactggggatgaattgataattgttgaagtcgggtgataggtacatagaaatttatagttttccctcaaattttatgtgtatctgagattttctataataatttttttaaatgtatgagactatgtacgtctcaaagtactgctttccattcttcatgtgttaaagacagagggaccatcagatcttcagatcttgctttctttttttcttttcttttcttttttttttttttttttttggcacggggtcttacccttacacctaggctgagggcagtcatgctgtcgtagctcactgcagcctcaaactcctggtctcaagcgaagcccccagctcagcctcacgaccagctgggacttcaggtgtgtatcacaacacctggctaattttttaaacatttattttttatagagacaaggtcttgctatgttgcccaggctggcacagcttgctgttaaataaaactatctttttgaaattgtcttatgtaaatctgtaaaagtattccactataggcacctaatatggatctcttttgacttttataacaaggggagttttgcctaaatgataatatatattgaatatgactttaaatttaatactctttttataggagaaagattttgcttttcttaaatatttactcctgtgttagaaaatatcattgcaaggaggttatcaaaaatagaagaattaaatcttggttttgttatctgtaaaatgatggagcaaataatatttaatgtgttttgaagccccctggacatgaacatgtatggtggtaaaccttgaaggattctatatttatatgtctgtatttctttataccaccttagttcaactgttttaccattccaagtttcttttccaaattatgtacaagcagatgaataagaatatgttgcaattgatttttcttaagcaagctcagtgttttttgttttttgacactttgtttggcaaaggaggtgttcaatttgttgagctgactgagacttagaaagaataaactatcacaggatctgccacaaagtagatgtgaggtagttgttcagtgagaagagagtgagagagttattccatccttgatccaaacatcactgttgggcaggtagatcactaatttcctattaaaccaagtggacaggacagtcctgaattaattatggaacagtttctttaaagacgtcagctctctgcatcccttgtcttgccactgaaatggtgctatttcatcccatttctcccttaaagtaattttgtgatttttgccacttttaaataacacattgctaaagtcagggtataatgcaaaaccaaaaatcgggtggagaatatcatataccatcttatctctagaaagcaatgttgtctgtagggcaagaaaacagtctttatttccctgcaaattgtgaatttttaatgtagttagttttgagaaatgaatgtaggaaactttgagcaaaacatccaataatgaccagtaaatacatttccagcccaaaagtatttgcacaaatctttttgtatcatattgtttaaaagcaagataagggcaaaacttagtatctcacagagaactttatatttgagctgtgtgtcaggatgacaggctttcaggacagatgatggcttttgaatataaatgtacacattttaatttttcctaattgtgtataaagattttaaaatacacaggcagttaaaacaaatatttagccacagttagatgcacaagtattgtatttttctcaccgatactactgctttattatgaatttttaccaaaatatacttttttatggaatgtttggttagtactgcactcttttcataaggagagatacgattcaatttccagttttcttcaggactctaatgccttgatacattagaataataagtgaacagtcaggaaaataaagaggtttcttctcttgggaaaatcaaactttcttaaaactttatttttccttcggaaactgaagatactgaccatttattatacattttgttggctccctgttctatacccactaccacttcaagagaaatcttcccccacctcctaccccaaaaagtctttttgggggtgtgacttttatagttgtagaacattattagcatttctcggtactgtttattttgaacaaaaccaatccatgcattttctatttgtttaggagtcggatggtcagggctgccctttctgtcgttgtgaaataaaaggaactgagcccataatcgtggacccctttgatccaagagatgaaggctccaggtgttgcagcatcattgacccctttggcatgccgatgctagacttggacgacgatgatgatcgtgaggagtccttgatgatgaatcggttggcaaacgtccgaaaggtaaaactagaaacatgggtttagttaaggtgatgtgaccatatgaaaaggaaatgatgccgtcataaatggagtatgactcagcgtatttgagtttagaaaagaggcacacacacatactagcctaggcctgtacagggtcaggatcatcaatatcactgtcttctacctccacatcttgtcccactggaaggtcttcaggggcagtaacacacgtggagctgtcatctcctatgataacaacgccttcttctagaatacctcctgaagaacctatctgagactatgttacggttaactttttttcataagtaggagtatactctaaaataatgataaaaagtatagtatagtaagtacataaaccagtaacattcatttattatcattatcacatattatgtactgtacacaagtatatgtgctatacttttatgcaaccagctgcacagtaggtttgtttacaccagcatcacacaaacacgtgagtaatgctttgtgctatgacgttaaggtggctatgatgtcacccaccaggcaataggaatttttcagcttcattataatcttataggatcaccatgatgtatgtggtccattaccgaaatgtcattgtgcagggcacaactactataatgttgacaggctgatataatcatagtttgagagagaactagattctcctcaaggtactctcattggttttaaacatcataatgagaggtaatgagagtgtttgtataaaattaaacgtcatctaacactggcaatagcaaatctgtgaagaaaaaatttaagaaaggaaattattaaatttggaaatggtgaaactgaatttgattaaaaatattctttgttcaaatctagaagaagtgtctgatagagttttttcttaatgggaaggctgtctcactgtttggcttctaagaggtcacataagatttacttttgtgaatttaccagaatctgagtttgctcattaatgttgttgactcacaaaaattgaccttgtcagttcactgagaatggatgttactgcccagtttaagtttatataaccaggtacacaacagactagtcaatgaaccagaatgccaactgattaatttacagaccagaaatacagtggtcaagagaggtagactcttggatatcaggctattccctgtacaggaagatacatgaaatcccaattactttcacaaattttttgctctcaaaatcagagaaatgggattgagtggtgtgaaaggtcttcatatatggtgccacccttcctcctgacttgggcagacatggctaatcagtcatgatacttaccgccgctgagttcagacttggccaacagagcctttcaacacagccctgaagatcttccactgtagttcattaggatttggcaggtagcatgaaacctatttgccattgtcactaggtggagtgatgataatgtgtaatggcatcagattgtattcaccgtattcatctatctctgtaggaaggaaatgcttggtagtggaattttgacaaggcatttctttgggttacttcatttttagggctgtgtgcgagttttcctcttgggaaactcctgcattttctcccttccaatgttccatgctgaccaaatacattcccttaggatattttacatacaaatttttacataggaagatatgttaacatcaccaacatggctactctcaaattttgcatttttctggaatgatttttattatttatcttattggtttttcataaatgttataatttaacactcagagaaactacacgatttcactctttaatcctgaaagatacagtttttattaatagtttgaattatgtgattttttttgacctaagaaatggaagaaagtagttattcctcagaaatcctgaaggatgaacaagaaaaaataatcttagattgaaacagacttgagacttgagtctcaaaacaaagttaacttaaggaagacgtggaataaagcaccagttctgctacagagtagtaatggcatgctaggcaagttatataacctctttcttcctcagtttaccccttcgtaaaacagaaaaataatagtagcttctctgttgggtgttgtgatgatcaaacgggatcaaggacctaagaacctagaagaacgtcaggtcaccaaagtcataaatgctcactatattattaccaatgttaattaataatactatgtaatacatattctaggatatactccataatctgagttagtagaaatcatttcatcactatgcatgtgagagagctacatatgcggagctggtgatattgatgtactgttccccagaagacataagtttgaatactggctctacaatgtacaaatacaaacaaatcacatgactagtctgagcctgatttcctcttctgaaaaatgagaagaataatacctccctaaattgttgaaagaatgacatatgttattaatgctggttttattgatttgtgaccctttttactgcaagttaaaaatgattttacattttaagtggtgtatatttaaattcctatataagtacctacaaaatgtccttgattttacatcttgtcctaaaatattcactacctggccctttaagaaaaagtttgcagccccaggtctaggacatagtaagcatttaaagaatggttattgaatggatggataatggagaatgacagaaaagtatttgagatacaacagctcaagtagttgaagtgctccaggtagcagtgttttttttagctgtgaagacatttcaattttctttactaaatgggttttcatcttcagtgatccatgtgagagggtaggtctaggctttaagagaaattttaaaaagaatttttgtataccttactgcttgggagaaaacagtatctgccctatgtgaatttgggaaaagttgcagtctcaacctgctttccattgaattaagttgaagcttgagcctcttttcagtagtggcactaacaatcgaaaggaaatgctgggaacataacatgagaagcagaatgttccaaggtgactctagtgtttctccttgatcttatcacccgctcccaagaccattcatatttcattctctctggcacactggtgagctttctgtcaagggagctgagacattttcaaattgatcctttctgttttttaccccacaaagagtagaatgatgatctcaagcattattgtcctagaagtcacacttcagtagcttatttggcagtcagcagtgtcatttaataaagctttacttcactacaatcttgttatactttcttatgggagttagatagtttagaaatttatatcacttgtaattatttgtttttaagttgaagaggtatatttcagttaaatgtctttatgtctactaatctgcctctagtcaattaaactgattgtgacttttatagcatttcataaatgtgtaccacttaattttcaataaaacctaaatttttatatagatacaagcataattctttctgaataatttggaagaatattgctatgatgttatgttcttatagtattttatatgtacttctatatcaggagttacactaaattgttatttaaaggactgtctttaaggccagggacaatgccttgtatttgtgttcccaggcacctaaatgcactcaataaatatttactaagtgaactaataaatgcacactcctgcacacatgttcctttagggcaatgacctaatcttatgcatattttaaactttgttccaacctgaatactaaatatatatatacacagagcatcaaactgatagattttatccagttttttcttataggagtggttataaacaaatgtcacatggtcattttgacacagtagttcttctacctgaatgttcttcctctgttttttaaatcattcttttgtcattcattcatgcattttcattcattcactcattcatttattcatttattttttaattaactgatgaattaatttagagctggagtctcgctttgttgcccaggctggactgcagtggcactatcttggttcactgcaacctctgcctccctggttcaagtgatttttctgtctcagcctcccgagtagctgggattgcagacgcctgccaccacgcctggctaatttttgtatttttagtagagacagggttttaccacattggtcagcctagtctcgaactcctgacctcaagtgatccagccgcctcagcctcccaaagtgctgggattacaggcatgagccaccgtgcctggtgcctggacttactcatttatttttaaaacattttattctctcagttaaaagagtgactgccagtgattgtccaacagaatggttccattgtttctatctgccattttgaatactcatctttttcttcttttatgagcgggccaatgataatattgtgaaattgtttcttcctgtcttcagcatattacattctttaaatgagtaatgctgccatcgtagcatggaaacctgctttgattgtatattcctgttaccatggtgatatcccacagctggagttcataaatagtagcatactaaacatatagtgtatttctattatttcttttatagttaaatgtgtttaataatgctaatccttacagaagcaatagaacctaaaagtctataatacatactttttgattccctctctgatagaaagtattttgtgatactaactagaatatgttttagattttgcccaagtctgtatcgttgcctgagttttcaagctgtcagaatcctgggataattagatctgatgtgagccctcagacaaagtccaggatgtgactggtaagatcacagccttctctctgacttcattcagatcagagctaaaaaacagtatctgttgctacccagtgatttgcttcattttgccagaggattaagaggaatcttaacagtttttcacagtattagtcaccaaatacataacatttacatttgaaataaataaaaatttgcatataaaaataaaatgttgacagactgaactagtgaatgagcccagattagttcttattgtcttaaacattgtattttcttaaaataatatttaaaatcttaatggccacattagaacaaaaatgggtatgaacaaaagtcaaggaagttattcttttttatgcattctcctttgttgccttcttcaattaaaatacatcttgctaattagaaatgtaacatgtcatctaagtattgcatttcctaataagtgtgaagaacgtctctatagcaggggtccccaaaccccaggccatggaccagtaccagtctgtgatctgttaggaatcggctgtgcagcaggaggtgagcaacaggctagtgagcgaagcttcatctgtatttacagccactccccacagctcgcattaccgcctgagctctgcctcctctcacatcagcagtggcatcagattctcaaaggagtatgaactctattttgaactgcacatgggagggttctaggttgtgcgcttattaggagaatctaatgcctgatgatctgtcactgtctcccatcacccctagatgggactgtctagttgaaggaaaataagctcagggctcccactgattctaaattatggtgaggtttataattatttcattatatattatagtgtaataataatagaaataatgtgcataataaatgtaacacatttgaatcatcccaaaaccatccccttcccctccctgccaccgttcgtggaaaaaatgtcttctacgaaaccagtccctggtgccaaaaaggttggggactgctgctgcatagtattcctgatcctaaggaaaggggtgtgtgtgcatatcacagtgttttgcagctatttttaggaggatgttgcctttttacgttgtctatttaaatctgaatcacaggattagagtccgtgttggagccgtaagatcaaaaattacaacagaagtgaaatacaaaaataaaaatagacattcgaaatgcagaacatggttctcaactataggcaattttacctcttgagggtattcagtaatatatggggacacttttgttttttgcaatgactaaaggatggcaaatactgctggcattgagtgggaagggccagagatactaaatatcctgcaagcccatgggtggtcctacccaaaagaattattctgaccatagtactaatagtctagtcctcaccactgccttcccacaacatttaggtagagccgtgagtgacagtaagcaatccgaaggcacaggtttgttgttcatcgtttacttgcactctgtttactgatcttctaaaagctcttcgtgcaaaatagtggtattttctttattagcatgtgattagcaaaagaaacaactgcatcatccaagtgctgtgtgatgtcgtaggataccttgaagacattgttacttatttctcaaaaataacttgaatacatagtatattagaagaagcaacacttgaactctaaaagttttgagtccactgcctcaggtagattgtcagctccttgaggacacaggctatgctttattcttctttccattcttagaggtttgcatggtgcttgatacacagtaggcccttgagaaggatttttttttttttaatgatcagtggtgacactgttcttaattgttatattcttaagtagagctgccctcttggagtgaaactgcctgggctcatcttctagttttcctacttagtatctatgtgccttgttttatttaacaccccctcccactccccttcccccaagtacttggtccataaaactctgcctctttaagattaaatgagttcatatatataaaaagccattagaacagtgctggcacatggaaaatgctaagtattggttgttattaatattatttttaaagtaaattaacaaagatggggtctcactctaatgcccagcatagtcttgaaatcctggcctcaagttatccttccacttcggcctcccaaagtgccaggattacaggtgtgagccatcacacctggccacattttttatactagtgttatttaagactcctgaaatattgctgtacttctaagaattaagttattagtatttttgagttgtctatggaaggttttcttttagatgttgatagcattccattaggaagaattagatgccaaaattttattggttaccaagcaattggttgtatttctttaacatattaacatctatatagttataatttcattgcatgaccacattaaaataatttactgttaaaccatgcttcaagtttgaaactcagaaaatgcaaacttgtcaacatgtcagctgaaacactattttgaggattaaataatttagataaggttacaatgttcttattttctgtataactaagttgaaatgattaagtattatctaaagtagggtgaagaactacagtaaccaaatagcaattgcttgttccaaccagctttagctggcatttggagagcaataagggttttcacatgaaagcattttttcagtgaccaaaatttattcctttaattctcagaatgttcttgtttcttggccatttttatggaaatatttctgaattatatgtcacccttccctgccttctcaaaattggttatgcagctgagcgaaccaaagggcataagaagccactgtagtcaacatgacacatttctaaaagcttacattttgctacaagatttgagggtagcttgcataaagagaagagaaccataaatttaaattaaaatcacacatatatttggatcaggatataaaatttgtgtaaatgtttaaagtaaaatacaaaactttaaagaaatttcaaggttatggaggctgatcataggccaggagatcaagtccctctcataagaaggtacttcaaggagaagcagtatcatcacttgtgttaacagtgtttaatatttcagtagagcagtgcccttaaggttatccccaagtgtgagactgcactactttaaaggagacctgtcggcaactttattgaccacttctctgccagacctcaaagagaaatcagctcttattccatttggtgtttcttaatatataggtttctgttttcctccgcttctttattgcttctaatttgaaaatttccagaagttactagtggaacatagacagtaattcagcctttgaattagtgaacttcattttacacagaaatcaaatgtccatattcttaggaaggtagcagggtgcctacattctgtttctgtattaagaagtagaaaaaaaaatgttcctcctacttcagaggactttcctgtttcattctgggtttctccccaaattattgtaggttgagacttctggaagtatgaccatgggtaaccaggaaatgattgtattgctctaacacaatattcttcatataagcttttgtttattatctgtggaggtactctaaaatagataacacaagtcatttacttaagctataatgccatatgaatatgtgagtatgtgtgtaagcatttttgtagcatataccctctctgaataatattctgtataggctactattttaaatactcttgatttttgttttgttcacaaaataaagtgaaaaaactgagaatagtagcaagtaaaatatgcttagactattttatcatgtgataaaagttttatcaatgtcttcattaattttcacgcatttatagaaaaacattgactctctgagtccttctcatcatccttattatagtaactgtatatacctttttcagatatggaaattcattaagtaaaaatcttgttaaaagtattataaaattgactttgattatctctgggactgtcagaactctcatcttattagtaattggagaggttttctcttgtcctgtttttataataagcctgactgtgcttgaagtttcttaccaaatgttttgccatttccataataatggatcttattaacgtttttataaaatggctctttaaaggtgtggataaaatgaagagtgactaaaatagaatgagttcccaattattattggtaattgctgaacatagtgagatgggcttttgactactttacttcttagggtttttctgtcaggattttctgttaagattgaacatgtggatttctctgttcctcgtggtagttataaaggattctgtgcattttgtcagaaaaataaataatagtatttattaatttccaaagcaaaaggatgagtatgtagacgtaaaagaatccaatgtggtctttaaatttctagaacaccaggattctagtttgtaaaagatgttctcatctgttactaggattgaagaacttaagagaaattgttagttagacaaatatactggtgtgatgataatacaggaaggaatcaaggctggctcagcctttggatttggaaagaagctgaaacagataatttatcataaagttttagaaacaagtgtaatactagaaaaatgtgagaatcacctaaaatcaagataaaggaatgaagtgatactgatcagtatcttttaacttgaaaggatgtttgtgtctttcccaacttttgcagttacctctacataaggattttggatattgtgaataagttctatacagttaattctgtgttcacattctactttctatgctttatgacttaatttttccatacttatatttgtttgtcttaagattagagagatgaacatgaaggagtgacaaagaaaggaactcatttaagcagtgctcaaaaggacatgatactttagtcattcattaacacatgaaaaccagaagagcacaggcgaaatctctaccatgaaaaagtcagaaaaatttaactgcagaaaaaatagtgacagcaattataacagatagaaagaggttgactatcctaatatataaagagcactttcaaatcaacaaagaggaaattagtggatatggggaccaaaaaaatgtaaaaagctagtgacccaaagaagaagtacacatgtccaacaaagattgcatttctttcaaattatttgtcaaggaaggaagggcaaatttaaacattggtatggcccattaaaatgacaatcaagcatcaaagcaaacaaaatattctttgcatttgagttttgtgtaatggtaattatcacacatggctggtgagagaataaattggttttaccatctggacagcaaaagagccttaaaaatattcataaattcgacacggttacatgtctagtatcttgtgctcaaaaaaattgtatgattctttccttaaaaactagcacatatatggttaaagatttctttatgatactactttataataaagaaaacttgaaaacagcataagtgttcattgcacaggaatggttttgtaaatccatatatgcatactttaaaattatattcatgaagaatgtttaccgctaatttttttttgtataatgctaataaacattgagtagacttaacattgtgtatgtgattaggaaccatcaccaatggctatatgtaggtgttctttaaaatatctttatatttccctataattccaaaatttcctagagtgaaattatgttctttataatgaagagagaaaaagtgaaataaacagaaaattgaaaagatacaaggacagaactgccaaaaccagtaaaacgtattttttatgggaaacagtttgacaacatgcatacccctaaatttataagcctaatccaattcttaaactacttttcttgttatcatttgttgtttttgtgtttaagaccctttctaggttaaaaagaaagcctaatcatgttaaattaaattttaagtttgcttttttaaaggtcagtgctaataatagcaaataatccaagaggcatttctatttgacttttgaatgcatttttacttaatttaattatttggttagatatttgattttgttactattgcattaagagctgatagtgggaggaattgtctgggacaaaataagaaataacaagggtgggcattttgtttaacagtaactttaatgggattaccttttggcagtgtagatgggcaagctttgactagaaatttggagataatataatagattacattctgtcccttttacatcaaaataatccattttcctaacaatttcatctaaataaaaattaaatattttacatcagcatttattttacataatgtttataaatgttttacatcagcatttattttataatgcattatttaattttattaacccataatgttctgtcaaatgcattaattttattctttaatctacagataacaccaccaataggtggtgacattttcaagactgcatggcctctttatattataactgaaatttaaatataagcaatttgaatataggaaatttaaatataggagatctgtggtttgaaatcaggttatacatttatttatatgattactcaaatgcaaaaaaaaattgttctttataaccagttggcattagagcttagatagtcatacttgaaatttacattttctaatcaagagtatccgtatgaacaaaatactaactgttgttattcagaatttaaatgaatcctttgctacttttctacccaagatgttttatacttatgtatttggtctgcatttttatacacaatggaagtagtagtgattaagaggaacagtggacaaatcagtaagtgataattagcacagttcacagtcttagaatttaaacctgagccaggggattggctctatgtttgtttgttattattgttttaccccaacagctccctttatcacctatcacatgtagaaaaagataaatggcctgggtgatttgagctggggattagaactgtggaagaaagcccagaaaagggtggaggaaatggctgataaggagtcaatttaggggataatatgaactggtgggctaaagatgaattcccacattcaggtcccagctatagaggcatttgaattacctggtgattacctgtacaggggaaaagtctgttactctagaatttagtcttttaaaatgcaaaaataaaaataaaaaatgcagctattacaaaaagacagcattgtcttttaaaggagaaataattttggtctacattgaattgatgtactttgtttttttttattttcagaaggataaaaaagagcagactttttattctttaaagtgagctgataaattttgatgtcctgaatttttaatatctcatccaataaattaattatggactggattgtgcaacattgtgctagatttcctttttttccgtagactttcaaataggaaggaaaaaacacaatttgtgatgactcaaataaattaaaagtgaccttctatatgaacattacctactaaaaatgtttacaaatcttcatagtgtttgaattttaccagcaatgaaagttaaggcaaagcttcagtacactaactgcataattgtttttaaaaatagtaaaaggttcagcaaagaataatgcattactatcaaaagagcattgttaaattatctactcttaggtaggaattttactctaatttaggagaactcaggaaaatgaggtttggtgagtttagtacatataatcaataaagatgaaagatattttttttcttcacatactctccataaaatccttctaactaagccaacttacagatactgtgtagcttctaaatgaattaattcttcaaaaggacagtacataatcaccttcagaacacagtatgaattgcgctaagcaagatatgcttccaattacattcacaaagcttcagagagcctgctcgtctggaagtatctaaaagttcaaggttattactttgccacacacattggtttggatgtctgttctgaggattttcattatactctttcagtatccaacaggctcttcaacacatctgaaatcaaatttaccccatttaaacatgctagaaatttactaactgcttaaatattagtaattaatccaatctagggtgaaagtcaagtcctaatactgataatgggctgttagctctatcacaattctgtgtcttgtttcagttaatgagagaagtaggaaaatatttgcagaaaaaaagtgcttggaggagcacaggtctcattcagcagtctttgcagtgtgtacatctagccctgaaaagtgtttttgcaagtaactaaagaactgtgcattctttctatatataaaaaaatatattgtttgggctagaaacagtattgatagctttgcttcttgattcttctttgtaaaggagagtagccatatcaacaaagcatttttttcaggtaatagcttttctagttctcagagaatataatttatcctaataggaatggtggagaattagatgtcctgtgacaattgctgatctacagtgtcaagatgctgtgatgcaaatagctttacatgaggaattttttctgatctatgatgattttgggattagttttgctccagaaggttcaaatttatggaacatgtgaggccctgtgactttctgggtagaactattcttttgttaagaatcactggctgtactcaagtcagtttgtgactatagagattctttattttctccttcagtgacaattgaatttttttgacttaccataaccgagctaaaagaaatgaaaaagaatcattaatttttaaaaaagaaatgtttctaaaaattgtaatgtaaaattatgttgaattttgttgaatgattttgttattcggcaccaacagagacaaagactttgcagtttagtaatgtcatgacaatattcaggcatatcggaggtatagtcttctgtttagctactcagatttatttattttattatttttttagagacagggtcttgctctgttgcccaggctggagtgcagtggtacgattatagcttactgtagagtcaaactcctgggctcaaggaatcctcctaccttagcctcttgagtcgtgggactggaggcgtgtatcaccacaccattctaatttaaaaaaaataaaaaattagtaaagaggaggtcttgccatgttgcccaggctagtctcaaactcctggcttcaagcagtcctcctgccttggcctcccaaagtgctggcattacaggcatcagccaccagggctggcctcagatttatttttaaaaagtctttacaaaggacgcataaatttccaactatataaatgtgggctgtgcagtgacttccttgcaaagagtatactatgggaaggaggagaaaaaaagaaacttaacagtgaagaagtctgataaacaataccacggtcaggtaattaaggtcagcaacagcagtgatgaatcatgttgatagcatggatccttgatatgatgtggtcaaaatgacactttacttccgtggtcctactcctcaaaacttttaaccccaggctaattatttttaaaaattagacaaatcccaataaagaaacattctgtataatctctaaccagtactttacaaaactgtcaaagtcatcagacacaatggatgtctgagaaactgtcagagccaaaaggagagtagggagacgtaataataaaaactaatacagtatcctgcatgaaatcctggagaagaaaaaggacattgggtataaactaaggaaatctgaataaactatggattttagttaattaacaaaagccttatacaatgtaactaagtgtgaatgtgaacgcaaatccattatctcagttaaagacagactaaatgataaagctgctgagttcatattaaattgtcaaatgatgacatcagcaattcgtacaaaggtaagtaatgttaggaggaaaatggcttacaaataagtttaaaactataaatactagcattcagaaacagaacaatatcaaagcatgatagatagtgttgtaaacattaagtctaaatcttcaaagagctagtaacttagacttggaaactgcccagtattttagaacagaatattgtttatcctgttaaggctacttgattaactgtatggcttttataacaaatagaaattaggttatgctgcattaaaacacatagacacacacacacaaacacacaacattatgcaataggaagtgttacgtacaaattgaaatacttactggcttttcgatgctactttatctaccagacaatatggaaaacttgtagtaacagaaacttagtttttgccagaagtacagacagactttcctagatatagttcattgtgtttcaagaaaaatgtttaacttgagaatcttttccatgtgtagtattaaggaaaaaaaaataggcttaaatcagtttgttttaaacacacaattatttttttaaaaccccacctgatttaattggtttgcaggaaaatagactacatacaagatacatgtttggaacaaagcaatagctaagtattagaatgtacaaagctcgagcaaaaaaatttataatatagagatccaagagcaatgtgcattattgcattatgtgtttctggattcctcataaaatatagatggttttcttgaagaatatctgcatttgattgtctttatactatacttttgctgttcttttttcttagcccctttctgcaatatgtaggaaaaacttatcagtcttttcttttcgtaatactacccttgagggacagtatgaactatttgcttctattaatcagggtaaactaagggaattcattttaacaaatgtatggtgccagaaaccttcttccaaccaaatatattctttaagaacagagaacactctgcacagctaataaacagcggcatctttctctttttctgttctagtgcactgacaggcagaactcaccagtcacatcaccaggatcctctccccttgcccagagaagaaagccacagcctgacccactccagatcccacatctaagcctgccacccgtgcctcctcgcctggatctaattcagaaaggcatagttagatctccctgtggcagcccaacgggttcaccaaaggtagatcaattttattagaaacacagatgaaaattttgtaagacaattattgattgctcagattcttttaaattccattactcatatttttttgcttttaattgtgaataagtttgatgagtttctcgtttagtttatggtgagcccacattcatatttcttgttttattactatgagagttacacataatttttgcagagagcatatgtctgtagccccatgatttgccagaataagaagcagagtaagtatagttattttgtaaaatagatttaaaaggtcattatatgcattaaaataatttgcatgctgttatcaaatgatattttacgctcatttttatagtgccatgacaagaaaaatgtgatgggagtatatttgcaaagggcttaaggtatgacaaattatcacccttgtttcaaggcgactcagaagagggaattatatgtagtttttaaacctggagaaattaattacaatgaattgcaatatttgcagagtaattatattactgtttaatattaaagacataatttttactctacagttaaacctacagtttattttactgtgtggattttttcctcgaatttgataagtataagattttaaaaattaattttatttggtaacatgctctgttgtctaaaatttgttggaagcacaatatatttagtagtgtttgattttcctgtattaccagttaacctggttttaagatcacacattattagaatatcatttagaattatgtaaacacaacagattccttttttctctgctattttctaacattaaaattacaaatcaatcatcagattaaccatgtaaataaaagtcaaaagctacgaaaagcatactcattcaattcattgatctatacctttatatttctatgtaagaatcagcctgatcttttaaaatactgtaagaattcataaaattgaagtaattccatatgtagtgctgctctgttacttgtgatcttttactattctggtaataaccgataaagaagcagagcacatttgcccccatatcagttttgctgtatcacagtgatgaaaacaaaaataaagaaaaagcttttaatcttctaaaaatattacaaatattacaaatcaagttactctttaaaaaaactgaaaccatgacaacttttctcctctctcctaaatcatagagatgtgcaaataaattattgacatattcttttaatgtcaaagtcattgtatgattttgatcttctacttgtttctgtatcatttctataacttaacatttggatttatgtactcatttctactttttcctaatgaaatgtatttatgagttttttattctcatttaaatttcattaactagtaataaaagcaacttattaaaagatggcacaggaatctagtaaaactccttgtttggcttagaaaattaaagcaataatacactagtttggaagttctgtcagtgcatggtacaacctttagtttttttttttttttttttttttctcttctgtttctttagtcttctccttgcatggtgagaaaacaagataaaccactcccagcaccacctcctcccttaagagatcctcctccaccgccacctgaaagacctccaccaatcccaccagacaatagactgagtagacacatccatcatgtggaaagcgtgccttccagagacccgccaatgcctcttgaagcatggtgccctcgggatgtgtttgggactaatcagcttgtgggatgtcgactcctaggggagggctctccaaaacctggaatcacagcgagttcaaatgtcaatggaaggcacagtagagtgggctctgacccagtgcttatgcggaaacacagacgccatgatttgcctttagaaggagctaaggtaagaaatacgcaaagcagaagctagagaatctgcttataaatgcttctgatggtcagtagcataaaaggttgggaagtgtttttttttgcctagcatggcacttccctgtaagtctttaattatccccaagttataaataatcagaagctcattaaaacttgaacttaagagaagtcaggaggttctaagtaatgatttaattttaatgtgaagacactagacaatttgccagagatttatttcaccttcccgtatttcatttgccaaaaatttcttctattaacaacttagtggtggtataatcagcctgcatttttttttttttttgagacgaagcctcgctcttgccccccaggctggagtgcagtggcgtgatctcggctcactgcaacctctgcctcccaggttcaagcgattctcctgcctcagcctcctgagtagctgggattgcaggcacctgccaccacgcctagctaatttttgtatttttagtagagatggggtttcaccatgttggccaggctggtcttgaactcttgagctcaggggatccacccgcctcagcctcccaaagtgctgggattacaggcatgagccactgtgcccagccagcacggtatttttaacaaactcctttagttccatccaatttttacaagttgtgttactatacatgtcataaatcagttgttggagttagttattgttgcctgggacagtgcacattaggcagccaggtaaaatgaacctcctatatacttaaaaacactaaaccaagtttactcttaaaaatcaagttcttttcccaagttcttttcccctaaaattgagagattctcacccttgttgacttctcacttgaaggatgttactactatcatttatatgtccaggaaggagtttatgtgtgcaggaaactgaagagacagcagcagaaatcatttactttagaattcttggtagttccttggcagaggtatactgtaataatttctggtatttggttccagggtgcttttgactctgagattagatccttgccatcttccctctgctgatggaggccttggctcttctgaagactataatattaaagtgatctcatctctgtagaccttaaattgatattttacagaagtagtctagtccttcaatataatggttaaagttggtgagttcatcttatattcaggatataaggaagaagcgtgacttgcactcagctcctctgtgtgtggaggtacagtgataatgaacactttgtatgacagtatttaacctcagtgatatggggtagccaggaaaggaagagtcacaactcagtagcacagcattcaaaaccaaaggcaaggagtggtggcagtttgctttgactctttgctggtgactcaccttggtaccttcagtctcatctattataaatatgaggatctctaaaggtttcctcaggttcacctaaatataatgtaaatgtaagagaacatactaataaaaccaattttataataatctctgttagtggggagctcctcctcaaaagagtttttccacaacctagaatgctgattggaaggacctgccattcattttcaaaaattttcaggtttttttttttccccctttagctttactttttattcatatgtgatcacacttgtcttgggaagagtgttagaagaagctgtaattaactagttatatctcagcagcatgttataatttattttctaaacggacttcaaaaatacttgaaatataatagttgttatagccatttcattgaagatatcttgtctcggggttcttttagataacatgttatagttttaatgctattataaatttgccctcctaagctctagaaaactggctgttaatttttttatgagatgttaccccaatttcttaggttattggtatgagatactgtttttattttattaactataggtatgaaatattgtgagttcagttataaaaacattcctttaaatatttctgtgtgaactttcatgttgtgatcattgaaacagattagtataatagagaacactgagtgaaaattttatctcttattgaaagctgaactttaatattgcttagttctctctaaataattctcattaagatttcctaagttctaatctcatatattgtgggtatttatattgcaatgctaatatcctccagttaatttcatgttactcttagatttggtgtttcaaccaaaattagacttctgagatttctaatttcaacctaattgtttaacttctggagtgagctgtaaaaaagaatttatatatagttgattcattgaatgccacaaaactataaaacagaccatgtctcctcttttattactgttataaaggaaaaatgattcacttcattagatcatagggcataccagaacttagataaattagaaaaggcctaattcctcttctcatttcattgttgggagacttaagaggttggcttcaactaacaactgacataatcacttaggatcctgtaattctcagtttctgtgatcctgggttggagtttgttaccaggctccaaaatcaggcctggatttcactttttgctctagaatatactggctttgtccccaaccttacttattttccttataaataaagtggaactttattttattcctttatataaaatggaataataataatacctggtatctaggataatagttagcttccagctatctaaatttctaaaccccttggttcaggaataaaaccaaaaataacagctgtacatagagtgtcaaaataagttgtaacacttggcatttttattcaaaatagttgtctgttttttaaaccgaaacatcttctctttgtttcactccttttttcttttatttaacgtagttcctaatgaatgcttggtaagcactcaataaccaagttaataacttggttaagcattcaataaccaagttaataactcggtgcttataatataatacttacttggtgctagtaatctaacactaaagccagtggtggagacaaacagtatatgtgcttgggtttgagtgtgggcaggtgtaggccaggagagaaaaggtggagggagaggatggctgtgatatgcaaggagttacaaagggacaggtttttatgtatcttgcatagttttcttatttaaaataggatttttgttcctctgcagaagagtagtcattttaaacatgtagatcatatacaacaagaaaaggagagcgggtgaagagaaaggggagatattttgattttttaaaaagactaagatttttaatgaaaatagtagatgttaacgtattttcacccttcatacctaatagtgccattttgttttgtcttactttatcattggattaaagagtgggagatttaggtatttggaggctgttttattcacataatttatcaggcccctaatataagcaaatgcgctttttttttttttttttttttggtcaaatggtaaaaactgccgcttaggtttagtagttttcataagcggcaaagcttcaaatctagtagcatcttcccattttagagataagaaaatgtagataagtactaaaaatttaagtgaaaactaattatacatgtggaacacaagggaatttataaaagtcaataccctgtcaatgggcgaggactcgcttcccttcattactcgtcctgtcattatgtcagttcccatcatccagaagaaccatttgccttttctgtttgcattgtcactagaacaatgaatgataggggaaatggaaataaattaagctctaattactccatttggtaattgtagagagctctgaggaaaaaattattctagctcatagttaaagtgaagtctaagaagtttttgtgatattcatttactccctttactcttcccctcctacctagcataatcaaaagctagccaaggtaatactttactttaaatgtggatctacaagctaagagttattgtttatttatctgattttgatggtaagagatttctatcctatagcattgtttccattctctgaaagtctcagattttagtcaccttataaagctgttccttaataaacatcttgttggctagatatttattgttgttggtggtttgttttaattatctgagcaaaataattcaccaaaatatattaaaatatgactaaaaacttgcaatgtatctacttatttctagatattaacattatacccaactgtcattatttgttctcttgaggcagtaagaatactgctgtttcttatatgataaaactatctttaactggtcatgtaacttacggtgacattgtcctaaagatgacctttgcatgataatcttttgaagatgctgcaagataaatatatcaaatgatttccctttttgcagttgtggcttgttgtacttttggtggagaggcacatgtttacattcatgaccttaaagttatctataaatttcaagggctgtctttcagaaaatcagtcctgtgtgtgtgctggtttcatgtacagtctgacgttgaaggacaaattatagggatacttttgaggtagcatgtgtaggggtttacatgtgtaggataaggtaaaggcttgtgttttgtaagatttttaaaagatgtttttcttaattgtgctaagattttcacaaaattgttttctctgtatctcaagggtcccatatgttttaatcttcagtttttaaacaatatctgaatcacaagaaaacattttacactttaggattagatgataccttgaggcatttagagaaatattactctaagataacctagatttctaataaattatacaagccagtttatacttctttcacaagtctacacttccactattttcttagttcttcaacctcattacctaattcagctatatgagtacctaggatgttcaagacactctggggaatacaaagaggaataaagcacagaaaagctagtcaggatgagacaggcatgtgattaagaggtaaggcatatgagaagcatccagaaaatgtgtgggatccccaagaagaaaaaaaattccaagatgcaggactgaaaaaggaataaagaaagcttcatgcaagagggtcactggctataaacattaaaagattggcagctgttgtttttgtaggtatgacagaaagaaatagcatggaggtgggagaatatgtatagtaataatgtagtcagttttggatagcctatagcataaaaagagtaggcaggtgaggtaagaccatggcaaggaaagttaaaaccaattatgaagtgtcttgaattctacattaagtaatcataatttggtaggcaggaaagaatatttaaagttttcttttctggcagaggaatgctagaaacagaattgggaatttagaagatttaaattggtagcatttccaatgcaattgtgatagatttcagacagtgagctaagaatgcagaggacaaaaaaatgtttcttagttgaggattcagtgaggtttcagtgtgaactgcttcagttgatactatcagtctgtgcatttgaggaactatagttcttttttaccatttgcaaacaggtttttcagatatctggaaaatatataaagtatttatttttagcccccaaagttgtgatttattgtactcactcaggtagtggcagctaaaatgatttttgggtgtaaagaaatggttgcaggtgagaacatgaaattcagaatgacataatgttaaatcttgtcctctagccaccgtcaataaatatgaacagccattttagatgaacggaaacatgatcatcattttataaagtacctgcgcatttaggtcctttgctatctcaatctactaattaggaaagaactatacagttctattccaagttttgtattaggcgtattgtcaactctcagtacatatttatgaacagtttataggaataacagccattaagcaaattatatatatgtgtgtgtgtgtgtatgtgtatatatgtatgtatgtatatatatgtatgtgtatatatataacatatatatactcacacatatttgctgagagtatttcagtaataatgaatttctttcagctaaacctaaggaaagtgatttcactagttaatacttccattaataagtgcatctgagccaatcagcagtcaatattaatttaagccttactgtgtgtaaagcactgtaaggcatatgctataaaatggtaaaggagtaatagaatttttgtcctgaaagaggcccagtgtggcctaaattctccttgacaaaacgtaagtacacagaacatgagcaaaatattatcagatgccaaacatcaaatgaatggttcagaaaagacactacagcatttcagtggccatagaaatcctttagttactatacatcagtaacaaatggtatttctgaaacagttagaaaaagtgacatttgcattttaaagcagattaatggattgtttcaaaaaattaggaataagtcacttaattttcttaggtattgccctccaagagtaagttacctcattaattgtactttgtggctttactagtgatagacatcattgcctgtatgacttgtcttcatgaaatttaatagtagtacataaaaatatgcaaactctgttattagtattttattctcatttacctaatgtgcaagatgaaagcaatttcaataccagtaaatgtttgagtgtattggtattttttaaagatacgttcataatgttctgattataaaatcatagttggtttattgttaaattagagccaatacagctgaaactattattcccatatctgtcttttattttattgttgctgaaattttattaagcatctatctatgttggatgctttgtcctaaaataacaaactattgcatataaaatccacattacattttcccaaatgagttttatatgtatttgtaatatgaattaaggaaatttgattgcagatatcttacattgtgtctattcctgcagcatgcaaagaattccaatgaagaatgacttccaatgctcaatatcacaatgagcgtttgtggtttgatatgtgtgtttgtctgttaaaaggcctttttttatgttaaaggattttattaaacttcaaaatgattaatatctattaggaaatttcttctttctggcacacttcagaacactttgccttgttctgttatttggccacagtcaaaagcccagataaaatcattgtatttaaaggtaatattttgtcatggtatggctacagtatattgagtctaatgaagggaaacatgaaaaaagagaaattggtactaaagcataagaccagtctctagtgaaactttaaagctataaaatttgattttgtagctttgaaatacgaacgttgatacatttcaaatatgttctttaaacttgtttcttattttaagttgataggtaagggtatggtcttttaaattttgtattctaaagcttccacatcattttagaaatatgatgggggaaagtaattggtaagtccttgactgaattatctagcactgctcaaattactttacatgtatttagccccaccatcagtctacctattaaatatgaattaataagagtttgcaaaataactccatgataaaaatctaatgattgcttataggtcttaaaatgtgttcaattttttcttgtgaatatgtttctgcaaaattatcctctcataaccgcccccctttaagttgctgtaatttcaaattgtaggagaaacgaacagtttttcagacatttcctgtagtgtaacagaaatctagacatcagaatctcctaattcagagtaattgaacactggctttggatggtcccatatgagcaagttagaaattgtggtttgtgtgttcacaaactgaaaattttgtttaaatttgcctgcacttggaaagccagaacaggtctctagttatcattagcacagaagcttcaaccatgaaagaacaaaggcacttctgattatattaatgtactgtttcatcagaaagtttaagaatgttccgttcaccatggagaaatataatttagagcactttaatttggaaggaattaaaaaaagaataacatcagtgctgcttttttctttaccccttatagagaatgctaacttttcaataaaaactgatcatagttggtgaattttactgtctacctatttagccattaatatctgtatctggtgtatataaattatagtattccctctcagtgtttaagaatcatggtgtaacatttttattttttgtgtaagcttgaacccctttgggcagtggtgaatcatcagtgtggtgctactgactcctgaataaattgtatgacatttcacttatttaaatatactgaacttacatattgtcttcagaatggtagagcagctatggctttaaggtccttcagaagttaaattcttggaaactaacaatttgatttactttcaggtcttttccaatggtcaccttggaagtgaagaatatgatgttcctccccggctttctcctcctcctccagttaccaccctcctccctagcataaagtgagttttgttgaatttggagatcacttgtctatgcatcaagatatggtagagtggttttgagaggttctcagtacagacactacatgatgaatagaaagtcattgatagtaaacagccagctgtatttacaaactaaattaccataaattaagatccttccctatactttgctggtaaccacaacatctgtgagacttacctaaactcttgaggttacatagagcaacagggagagaaagctacgcattccttgcatcaaagagggtagagtagcacaatgaggtatcccttcaaatttacctcttctcctcagaggtatcccattttatctcagcttcccagtttgacatcataaaataatctttggttccaccaggtttctcatttctcacatccattcagctactaagtccttttgattattcttttggagtttttcatattcctctaatcttctccattgctctagctttgcctcagagctggacaactgaaagagccttttatctgataatctcttatgatcggagagttagtatcaatgggtttacggctagtaaaatgagataactgggtatctcatttgaaaaatggggccccagaggcacactagatatctctcattgatatcttcccaagttaaaccaggataaactggatatcccaattctaattttcctgctctttatatgaagtcaggatgtctgcctttcctccggtatattttgttcactgtaactgagttcatttaatttaacttctgccttccccaggtcaccttcccactcaaaaactagcattgtttccctttttccattaaattaactctatgcacttctgctaacagtaagatcctacagaattttacccaactaaaatattttttagtgattcctaatacttgccctgtaattatatctggattgttttttctgactttgtgagatttttatgctgttcctcctgtgcttcaccttttcctaatctttatcctaaaggtccatatctcagactctatttctttgtgaaatgttctgtgacttcttcaattgtagtgattaagactgatttacattcctcttcctgcagtttatttcctactcatttaattatatactctgccatactgttttctaattttaatgtgactctccaattgaaaagattacaagactttgaggacaaaaactttgtgttctctatctcccataacatcttactgtatttgatatatactaagtaaatgatttgcatatagtaagtaagtacacagagaatacgtggatgcttggtttattgatttaaattttatctgctgaggtccttatttacaatagaaggtcttagagcttcttcattccttcatctgcagttcactgaactcccactatacatatcaatgcaaaagaaaaataaggtagatcccagccccccagaaatttacagtctactttagaaaataacattaatgtatatgaaatcattagagaatggtgtgcactaacatttataatgctaacttagtagtttcaaatgagtttggaggagaggctgttatagactttgtgaatgaaggatgtcatggagggatgggcatttcatgactcatgaagtacaggcacaattgggaaaggcagaatgtgagaaaaaacaagggtgtgaaatttggcatcattcaggggacggtgggaaactcagcgaattagatcattctccagtgggaacttctcttggaactgcgagatatttagcaggcataggagttggaagcaattatacatactctgggtagtaggctctaaatcagtgacaacatatgattatattctagtgctaaatgaactctggatatatgtgcatgtaataaaacatctaagctcaattacctttgataactcagagaacattagaaaatgaaatcttgctaattagagattaaatgttcacattctgtttattaaattcatattggcaagcgagctggaagttgcagtgtgcttcatttgtatttaacattaaatacctgcttctcctgtaaatgaagcaagaataacaaattgatagtaaaatgtattttttctaatacttcagttggtaagtgcatctaaaattagtcatactttctccctatttactcttgatttttccctcagaaacagtgcaattgtttcacttaactagagaaatattttaacagtgcatgcttgccagcaaattagttttcaattttgcatgctgcaagtcagccatagttagcagtacaaatgctagcttttaatggcacagttatctctccagtttatttttgtttctgactctgtgggtagcagttgttcactgtagacaatatgcaaagtatataagagaaagaaaaaagtgagatacataagcacaagcatatgcatatgctaaatatcaatgtccagagttttaacattttgacattttttatttaaacttgtttttaccttatttagattatatggtagagataattttatgccctcctttcttaacattatcataagcatttttcttaattgtttagttatgcattgtgtttattacaaaaccagcatggaatgctgatgtgaacagtagaataaaatcagactgtgtaccacacctgactccgccattaagtatttgtcttttttttttttttttttgagatggagtctcactctgtcgcccaggctggagtgcagtggcgcgatctcggctcactgcaacctctgcctcctgggttcaagcggttctcctgcctcagcctttcaagtagctgggactatagtcgtccgccactatgcccggctaatttttttatttttagtggagacggggtttcaccatattggccaggctggtctcgaactcctgaccttgtgatccacccgcctcacactcccaaagtgctgggattacaggcgtgagccaccatgcccagcctttgtcttatttttaacaggaaaacttctctgggcctttccccatctggtagaagagaggatcagtttaacttaaattatctccaaaatccttttgagattcagctttttaggttctatacagtgtgtttttttaaaggatactgatggcaaacctgacaataacagtgagtcaagagtcttggctgtggatggtcttagaacagaggtcttagcaaaatgccactcacagaaataggaatgtcagatgttcgagagttcatttccatcttagactcttggtatatgtttcaaaatcaggccaaagcaaaattacgcattcctaccaaacatacacttctgtagttcttacaaatgttgaaaactccaatgttaaatccaagaatgtcaaagctaacatttaccttacatttatactatgttgttataaatatttactgaaatagaattgttaaatatttgatattgtttactctgattcccatttacatgatgtcagaggctgctgtcatagtgtttcctgttaaactgtatctttgcaattatttgacttttattgtgtaatttgtcttgagacctagaagagtatgaaatttacttttaaaaaacatactgttgtaaaagcaatctgaaattatttgtatctatatacttaatttttctaaattaatgtttttttctaaatggtttctgcttaacatctttgacacttagctataaatataaaattttaagtaaatcctagaaacatgggtaattatttttttggagggagaacaaaataatcctatgtggattctttttactttatagtttaaattatttatttactaaattatatttattttgaaataatttgatttttcaaaattaaaactaaatgatactctgaatagttaaggaaatatttattttacttggcacacaatagattggcaaatgaacagaggcattattacaagtaataatggagtaattacttccaggtaagataatgttctgaaatgctgaggaatatctttttttttttttaagaattttttttgtgtgtgtgccttgtcttttagagatggaccttttgtacttttgatatattaaacttaggctttcaaatagccatgaatcaatattacttggttttgcatttttgtaagaaaggtttttttgttgttggaggtggtattatctatttttatgaatatatattcttataatatatatttttctaaagagataagtccttgtatttttggttccataaacagagaatacaaatttcacctaactgtcctgttttcattcagttgctttacttactagaggttcagtttgtacaagataaaatcctttatcctctttggaatttaagctctagttagggagaagagaaagtaaacaaataactatattgtatattgtcagctagtggtaagtgctaggaggaaaaataagcagggaagaggataaataatgatagagaggtttatactttagatgaggtcattaggaaagacctctctgaaaggctaatatttgaacagaaacttgaaggaagtaagggagcaaaccatgaggttatctgtgtgaagagcacagaggctggatagaacacaagtacaaagcaacttcaaatctgtttctccgatttacaaacaagttagtgaaaatgcttataagtaaagcttatcttaaagcttgatagtataccacacagacttttttttgatgtcatgaaagacccttgaaaattagcatgtatatgataaaatttagtgttttgaggaaatgatttatatgtggcacatgtgcaaaaatcatttcaaatatagctatattttgttttgtctcttctctggactatttatttgagttagacatttttccctgttaggattgggataatgtaatataagaaatatggtgtaatgtatagggcaagctctaaagattctattttaacagaagatattttttcgttacttgccttcagatactattaaaggaagatagattcttatatgtagaaaacaagcttactaattaagcatagcattggatactatctcctgtgctggcgtgaaaattcacttgtttcttggtttgtttcaagtgtgcatatgtagaagatgaatgtatttatcactgaaggctcaaataactaacacaatgaatttaataaaatgtccaggttgtggggggggtggtgactatgcatctttgagagtgtatgtccctatgtattaccagtgtattaactcagtaataacagcatcagtgcagaacactccgggaatgtaagatgagaatataaagggattgcagtaataagtgtaatggtaggctttaatgtggagtcagccaaatacaatttgttcagctttattcctctggtatcctaaaaatttcccgtaagtttagtcaatgactgaaaattgtcccatgccccataagatagaaattttttctactgccaaatgtcacatacatggatagataatgactaaatataaatctaattattttacctgttatttagtagtaagtaaaattaaacctgttttttgaatgagtttgtagaggaaaataaaaccccacatgtaattccagatggtataattagttacatgactctagttttttattttgctattttatatacaacttctttatctcatttgtaccatcctcttctgttattttttttgatagaaaccagttttttttttcagaactggataagattaatttttaataaaaactatgtaatcttgaataaaatacactgtaatgttattcttttggtttatttctaatccaaatagactattatactgatattaaacattttcattaaaaaacataagcagaaaaataaaatctgaatctttagaactttattaaaatggtgataaatggaacacctaagtatttttttcatatttagatacaaacaccacttgaaaactattttttcacttctagatataattctctaaaatctgtgtaagttgacaatttatactagtaagttttagcaataagccttattattccatgaagtattagatgagctttgcttttcacttcattctgaaataatctactgatttgtggcaaagcaaaagagtgggggaaattactcgagaaattctctatcaatgaaggtaaaatatcaaattagccacaacgtatgtgatttaaaaaatggtccattgttgactcataatgaactgcttctttggaaacttaaatctttggagggaacctgcaacaggcagatcttagaacatttctgatattgaatagttgttgaatgtttagtgaaaaatactgttttctttttacatagtgtatgcttgaattgcatagaaagggattcattataaatgaaagtatcttaggcatagagaggatgtacagtatatatttctcatttcatttggtaatagaacccattctggtccttgacttagctaaattgatggctgtgtttacaggaatttatggaaaagtaatattataagtctctcccagttccagtgccatcagatcaccattttgcagcccatatacttaacttcctttaattggaaagtaaatcctccaaagttaaaccataataggtgtaataatagattattattaaggcccttagcttgtgctgtaggtagtgacactggaccttttgtcactatgcttttgtctctgtgcttttgtctccctgtaacgctcatgtgaattctaaagttgctcaaacaacaagaatttaaagatcagtattgaaatttttttcaaagataggtatcaataaacatacacttgaaaaatcttagtttttctttgatctttgaatgtcctatctaatgacttagataatatggttgaaacttaaatctttagatttttcaaaatgccttcttgtaatggtcacaaagaaaagcccctaaaattgtttctgttctaactaataaaaagaaataaaaatgaatgttaattcaggcatgtttgtttaatataccaaaggcctcttgctccctctatagaaggtgctgcaaaattgcagtcacttagtttttttgttttttttttttccttcctttttaaattgaacagatttctcatgaggttcatgatgattaacaaaaagatttggatccatgtgtgtattcccaatgccttgcaaactagttggtcgtcctaaagtgaatcaggatgagtttgtgcatttctgccttggcatttttcattggcttcagccagggttagattaaactctggtagcaacagttacgaaaaacattgtttatgtttgcccatttgtttgggtttgttttatttggtttatttactcttatggataagtgaaatgcttaatgtttttgatattaggtgatggttttactcattttaattctcttttatttagccagggaatttaaaccataaaaataatgtacttcaaagacttaaaaataagttctctcattatctacatctaatcattccattcatttctagctctcagttgttggtaggaagaaaaacctaacaacttcaactataatttcacaggatagttaagttttacagaattaaactggatatttttccaactatagataatattcacaggagacaaaaagtttgaccattctataaagacttctttaatatataaaacaaccatgcttattattgtagcatcatattttacccatttaatttaaattggaacaaaatattaatattttaatagatttggtttgaataaatttgtacattttgtcttacaaatccaacatctttttattttattcgacaggttactagtttttcctattgtgccatttaaaattgtgaggatgaaaattcttttatcccatcaagggtcttaacaaaagattgaaaattgttttcatttgtatttgatataagaacagcttctctgatgataccctgtaattgaaaaatgaacataagtgataaagtagcttctttgacttgaatatgtcacatcagacttgcctgttttgaatattatgcttaaactagattggattttttttcccctggtaggtgtactggtccgttagcaaattctctttcagagaaaacaagagacccagtagaggaagatgatgatgaatacaagattccttcatcccaccctgtttccctgaattcacaaccatctcattgtcataatgtaaaacctcctgttcggtaagagtatgggcagatttttgccacttacatctgcataagcattatcatttgtaatgtttgtttttaaacaattgattcacgtctaattaaaaatccttaatttccagctcaaatccttctcttcctattataccatttccagcattacttttaaagaaaactaaaagatgcagatttctcattaatcaggaagtcactttattttatcagttctaaacacctatctcatgaagaaaaattagtgctcagaaactaaggtattattctgaccttccttagaatttttcttcatgatgtacatactagtataatttaaattcattttccttcttgatgtacttgctacctacttctattcagattttgaagaagtgggaaaaaaataccaaggtgtttctcttaactttttgtttttctatcaagtgctatttaccttcctttagatcaaataagaatgtgaggaataggccaggcgtggtggctcacgcctgtaatcctagcactttgggaggctgaggcgggcagatcatgaggtcaggagtttgaaaccagcctgaccaacatggtgaaaccctgtctctactaaaaatacaaaaatgagccgggtgtggtggtgggcgcctgtaatcccagctactcaggaggctgaggcaggagaatcgcttgaacccgggaggcggaggttgcagtgagccgagattgtgccactgcactccagcctgggtgacagagcgagacaccatctcaaaaaaaaaaaaagaatgtgtggaataatgggggttttttccttacttttgtggcttattctcacttacatggggatagccttggtctttgacttggaagctccatcgaggtaaataagagttattaataatgggttgtttgtattgaaatattactttatctttaagtaaaggcatgagtctgcatttatattattgaatttataaactgaaatctattatttctgggtttgtttgttttacctgactgaaatatatgaggtactcagtactcccagctacaaaacttactttctgagttctggtttcctttgtataacattcctggggccatgcttggcacatagaatagggctcaagtactgctggtggccctacattccagcatctctccatgactgactgagggataggggagatggcaattacttcagtcatctgtgccatctttacttagtgtgccatttccttttgaggtcaagtcaatcaactgaaaacattttataagtacagtgttcccttcttttccaatgaaaaactaaaaaatgttttaatgtgtttcttcaggcatctcactgaggtaggaaatgcagcacttggaaagagaagcacattttcattttaagcagatgtctgtcttaataagtgaccctggttagaattatcaacattctgctgaattattacccagaattgttaatagtctacagcgcaggactttatttttttaaaagcaagaacctaaacactccttgctattgctggtgtttagataagacatctgttgataaaatcatatcattgagaagacaaagaaataacgaggagctaattttatgtatcagaagaaccaagtagctagtgatgtatttgagaacaaaagatattccttctcatcaaatataagttgttacaattttcggttctttggctcttacaaatgtgcagtaatttttaaaaactaaagtaggatgagctttttttggtctctttgggagtcttattttttttcattgctggataagtgaggagtataattttaatacgttaaattttaattgttacatcatattggatgtgattttttgtggcagagctcccaaatcttgaaaataaatttgaattataaccatcattaccatttttctattgttacagaaaagtaataaacgttgataatccctaaatgtaattggagtgaattctttatctaatttgttcttgaaagctgatggatgaagtatcttcttttgtgctctccaaagagctctttaagcttaacactttctttccctgtgtgtatttttccccctttggaacatcaggagaagtgaattgtcaatatgtagaaaaagtgacccagtaaatgagtaattcaatttaatttcagtaaaaatccatcattattatgaagattcaatacatgataactatttttaaatgaactatatctggccccttaaagagaagtggccaccagagagaatagaaatgaatttcagatgaagcattcttgcattatctattcaaatatccgtctcttccattacatacgcacttttactttgctctaaaaattcagagtaaatcagagaaaagtaaaatgtaaactctgatttctatagctctttgtcagttgattgttatagagctatatgctgaaggcaaaatatgctccttatcttctcttcctgctgctatcttcccatggctcaattttaaccattgtgttcatagtatgattccgaagaattaataccaataatttggctgggttcggtggctcatgcctgttatcccagcactttgggagggtgaggtaggcagatcacttgcggccaggagtttgagaccagcctgggcaacatggcaaaaccctactaaaaaataaaaaaaattggctgggcgtggtggtgcacgcttgtaatcccagctacttgggaggctaaggcatgggaattgcttgaacctggtaggcggaggttgcggtgagccaagatcatgccactgcactccagcctttgcaacacacagatacacacacaacaaaacaaaaaaagccccaacaactcaagcatacttttctggtaagtagtaccctttacaaacacattaaaaactgtacttgtcgtgtacccaaggcctttgctaaagtcattttctgtagtgtcagagggccagaattttgttcttggcagtggtgaaatagtaccacaggctctagttctttgaatgttcctgtcagaattgtaatggaattattgaaagttcaataatttttcttcttttatgtgctgtagcttatttttattacaaggaaattttaagttacagaagcaaaaatatgatattaaatactatcaacaaataataaagtcattgagactgctatatgtttttgccttggcacatacatctttttttacttcaaaaacttgaccaggttctattgaattcttccacagagataagttaattttacatagtgtttaggatatcaacaatttttgtggcccttgtaattcttggttatagtttaaaaaaagagagactgtgttacttgagatatttacttctacattttaaaataagggatgagtatcttgatgttattactggtaattttgagaaaagaaaaatatatgttcaaactttattaaataaacaggaatactagttccctctacctctcaagttacttttaattggaaagtattctccttatataattttactctgaactgtcctttaggtcttgtgataatggtcactgtatgctgaatggaacacatggtccatcttcagagaagaaatcaaacatccctgacttaagcatatatttaaagggtacgtatagaatataatttcctttgtgatgtacatcttaatggtcagaatttaaaggcaaaatttcatgccattgtactgaaaatacattaaggttttgtgttatcctctaggagatgtttttgattcagcctctgatcccgtgccattaccacctgccaggcctccaactcgggacaatccaaagcatggttcttcactcaacaggacgccctctgattatgatcttctcatccctccattaggttgaaacctttaaaaaagttttgaacaacccacccctccttcttttaatttcagaattttcagaattcagagttcagtataacacagactcactgggttgtgaatttgcctgaaatttgaatgggttctccaggtgccggtgactcccaagttcacgagaccattactccatgtagatgattaaggtagtagtgtagtagttgggcatcagtcaggttttaagcaagttgttttgtccatactaaatgtagtctaaaaacacatgagagctttgtgctctagtagttttgaagtgatgacttgaagtgttgagattttctttaagtataataattcttaataaatatgaacttgcttttcttgcagcatgagcaccagttccacttacgctaattaaattatgcaaaattaaatagttgtatgtagagaactgataataaattctgttttattctaatcattacaactgtaacacattcaaaaaaatctcaatttccttgtttcaaattataataatgaagaaacatcctatgtgtatttttgtttgtatccacaggtgaaggtatatgtaggtgtgtgtatatgttgaagttggctggtgccactgtcactgttaatttcattaattctaattaggaagcatctcaccctgtttttagaagacagaatgtctgcacaccttacataacgcttcacaataacaagtcactgtaacataaaataatatatgatgaaagtcaatttacaagcttttctgaactggctgttaggccaccagaaatacgaaatgaacctttccattttctcacaagtaccactgactagtattttgaatgacacaattgcagtatcttttgctcctgttctctctgtagttcaggactttattctcacctacatcaattacaaaaggctcctaactctgttacctacagtctttctctcccttccacttcttcctgcacacttgtttttgacatattacccagatcttcatcacctggataagcattgttcaataaagctttctgtggtgatgtaaaggatctgtatatttgcatatgggttaagtgtgattatggaactgacttttcattaaatttaaatagctaaatgtggatgggtgactactttatatgacaaagtagacagattttccaacctgtctttttaccttgacctttttctaggtcttcttatgcgtgtcatttttttcttcatactgtttactctacttagacgatcctgtccttgcatttgatgaataaatttttgagccttctgatatcccaggacttcctgttcttcaacacttcactgaataccacttgtctacatttctctttcctcatccaatgcatatgtctcttttatgggaccaataaaacactttcacttgtaaatcatacctatttgtgagcttttttttaagctcctttcatggaatctcagctccttgagtcagagccttataattttgattttcatatcatgcatgagcctggcccagtgtcagatgtttaagggctgaaaaaagatttgaataaatatgataatgtaggaaatagctgaaggttaaaatgatagcaaaactctgtcttgtgcatcttcagatgtgttaataagaaaaatatgattaaagaaattagtgtgccaattttttctaaagcaagttcagtaaatagtaatatctttttttttttttgagacagtctttctctgtcaccaggctggagtgcaatggcacgatcgtggctcactgcagcctccgcctcctgggttcaagcgattcccctgcctcagcctcccgagtagccaggattacagtcacgtaccaccatgcccggctaattttttgtattttagcagacatggggtttcaccatgttggccaggatggtctagatctcctgacctcatgatccacccaccttggcctcccaaaatgctgggattacagacatgagccaccacgtcaagcctcatttttctttaaatatgccattatgtttaaatcattcaacttaaaagtgtgaatttttattattagaatatgtgtttatgtataccctgtctcattcctaaagtattttgagatagcttaccaaacatgtgctttttttttttttttttttttttttaaagactcaaggtaatgaaaactatgagtagaatagtaaggtgtgacaggggacaaataagtagatataaaactatgctgcaatattctagttattaaagctgggaaatatgcaaatgtaagtagtgcttggaaccagagaaggttctatatttagctgttcttctgtagctaaatctgacaaattgaaaaatatcatattctctgctctaggtacattttatgtatattttgacagcatatcaaatatatgaaacattaggttaaataaattaaaatccagtggaataaactatatgggataatctaaactattctttgacattaaattatatgtatttgaggtgattttccagttaaaggctgtgaactctttttgctacacagaaaatcctgttttcatagtgtgactgataataatttttagttcaaactctgagtcctaatattataaaggttacaagtgaactatgagctgtttcataagttacaatgctgctttttataaaaaggcctgatagaaaaagtttgcatgggtgtgtttgtacgtatgtatgtatgtatatgtgtgcatgtgtgtgtttctctccagactctcccacaaaataattagatcccattatcaaagttggtgaactgctggataaaccctgcgagtgaaattctttataagcagcaagagaaaatcaattattacttttgttagatgctgtgtattttgattaatgaagttctgctgctgatatcgacctttctttaaatgcaggtgaagatgcttttgatgccctccctccatctctcccacctcccccacctcctgcaaggcatagtctcattgaacattcaaaacctcctggctccagtagccggccatcctcaggacaggatctttttcttcttccttcaggtaggagggaaaagccaaagaaaactattcacttaaagcaaaaatatttccaaaaccatactatcaaataaatgttagtgattcattagtctctacctccctagcagaacagaaaaatccctgggtggtaaaagtagcaatcgtgggtacgtttgtttgtcagttgattggtttaatgccaacataattacagagatggaaagagcaataaggaactacagtagaaatgatgctgtagagattgtccagtccagaaacctccttatgttacaaatgcaaccctgagaaccagaactgctaaggggttaggctaatagtaatgggaacaatatttagactttgtcttccgattcccaatgcaatgttttttaataggtttttaaaattttactagatatgccttagtgtcataattttgttcaaaacataagattttggtaaattatgttgttataacaagaatagagaagtttttctgaaatagctgcattttattgttttgttgtgatatttttaatgcctcagtgtgtatctactcactaattattggtattctaaggaaaactaattttttcttagtaactatttaatattattatttacatatgtatatattatataatattatttgtttaatattagtaaactaattttttatattagtatattttaaaatttcaaaagaggatctgaaataaaaatgaagacttaataaactatctgttgcattagttagaattatcaggaaaaagaaaaaaaaatgttatatggaatctgctgatactaattaacagttccagtctgtcttgttagtgatactgtgccctgaaacctttgcctccttggacttgatttgggaaaatacagggtaaagatgttctttttttcatagttccttacatttctacatgagataaatcatgaaaatctttaaaaagtgctcagtttgtcctttagctacgtatatgcctcatggaaacttgagaatctttattcccaactgattcccttatcagcttcctcagttgattattagtcatgtctaccattagtttttcttagttttttttttttttttttacttggtttgatagtttagaaagtttgaagagatttgataagacacacaagttatggacgtacaacttggaatacacagcttcaatttcttaaagtggtttatttttcaagaataatcttctgcttttacatcagtaaatattgattgagccattcactgtttacccatttgtgatagatgcctcctgacctgtggaaccttatgagtttactggattctgccaatgaaagcactagtgtcataatccattccggtccaagcaggaagtatagtgtatgagtccgttttcacactgccataaaagcactacccaagactaggtaatttgtaaagaaaaggggtttcattgcttcacagttctgcatgcctggggaggcctcagaaaacatacaatcatggcagaggtgaaggggaaccagggcatgtcttacatggcagcaggtgccagagagagtgagcaagcagggaaaatgccagacatttatcaaaaaccagatctcatgagcactcactatcatgagaacagcatgggggaaccacccccatgatccagtcatctcccatcagttccctccctaacacgtggggattacaactcaaaatgaaatttgagtggggacacagagccaaaccatatcataactgcttgggcttttattcatatagttagttacatgtaaacactgctgtatttcgctattttttttcacttattcaaaactttgtcttatacatagactttaacatgatttttagaacaatgagtcattccaaatcttagttacttaaatttcctgatgctaagttcaagatagtttctggctctcctattaccttttatatgcgtaacttaagccccaatagatggaactttgatgatgtggcttttctgacaaataaagtcaagctttccaagagctataataaaagagaacattttacacaaatacacacttttacctgtttttgtcaaaagaattgtaaaaggttttagttatttattttatcttaattgttcatttccttttatataaaatcttcataaagaaacccctcaagattaattgctaaaaaaaattactagtttaaaatgaaaatgtcccctcttattagctaaaatgcaatttttataaaccgttgtatttattttatagatttgcctgttttgtgtttgcttggctgccagggagctcaacaacacttatccttaacttagagtgtcaggctagcatgggagtcagggcaatgtttttcaagcctgttgactctctcttgactttcattaatagatggacatattctaattctcttcccaataatatcaacatcccttataataagtatttcttaaaaaaaaaaaaaggcaacttttttgtttccttttccagtctttcataatcatttacatgacagatttctagtctggtaccagatcctttatgactttttttttttttttttttttgagacagggtctcactctgttgcccaggctggagtacagtggtgcgatctcagttcactgcaacctctgcctccaaggttcaagtgattctcctgcctctaccccctaagtagctgggattacaggtgtgcaccactacactcggctaattttttatatttttagtagagatggggttttgccatgttggccaggctggtctcgaactcctggccttatgtgatccccctgcttcaacctcccaaaatgctagaattgcaggcgtgaaccactgcacccagcccctttatgactttcattgtgacaattattttgattcaaatttaaaaccgtgtgtattagctttcctccttttcaaaagaaatattttaatattttaatgctattgcatatcatagagcataaagatttttttggctgataaatgagcatttgagtattgttttgcaaagtatttaatacattatactgtctaaagaaatgtaaaagattcattatagcagttctccctaagaattgactttattaagaatatgctataaatgctaaagtttaactcagtagttttagaattataaaaggtaaataaaagggactgcaaaatttaaacaaactctgtgagcattttaccgttgttttcgttgttcagtctgtaaaatcttagtctggtgtaatgatacatcttttctaaacattattgagatttggtttcctgaggaaataattatttctaattaaagacaaatgataggtgtcttaggaagagaggttgaattttctcatgatattatactaagtacctaatcaagcctacatttttattccagcattcagtgccctgcacagttgggccaggttcagcttttcagccttatagctcattgacttctatatagtagtgattgtcaaattgcagtgtcctatgtctctgcaaaagtgcctcagtactgttgtaggatcaagggggcagggcaagcagaggcagggctctcattcttcttttatctcttttctattttaggccttcatgtaagatttcttttggcagaatagtaatgcctacagctgtacatgagccctcagttttggacaggccaatcatatcttaacaaaacctgaagtccccaacaaaagctttacactcttttgtctccaatcccaaggctaccactagtgtatatgtgcttttttccatattacaaaaaagtacttcctttttgctggtagattgaagtagacacccctacctctactttgtgccaggtcagggctcaagaaacaaagcaaagactgtatttaagtcctgctcataaccataactaggtgtctttgtgcagtgcacaaaatacagtgtttttgtcagtctttatgctacctttattttgctgtttctctaacctgtaatctcacttgaagatcttatctaatcttaaagtcacagttcaactctgaaagctagccaaattgactttattaaagataaatggaagttttattcttggatccagaaatgcaactgcataagtaaaatatgaagaaaatccagatcattagcaacaattgttgaaaaggttttaggggttttgttgactacaatctttataaagcatcatcatgatgagaaagcgcatgccatttggggcttgaactcacagaattcaaatctgaggagtgaagtcctccacagtactcagcctttgtggagaccactgtgttcagatgttgaagcattaatgggctagagcagcaattctcaaattgtgttctccggattcacaacattagcatctcctggggatttgctttaaaatgaaaattcaagacttaataaatcagaaaccctgggaatgggactcagtggtcacaagccttcctggtgattctgatgcatgttcaagtttgaaatatactgggctggggtattctcaaaaaagtgcaaccaggatgataaagtaaactagagtggattaaaggaactgagaattggctcagagaagagaagaccttggatgtagacgagagttgtcttcagttacagtatttgggaaagaaggattatattttttccatgtcacttcagaaggtaggagtaagatcaatgggaaatgttaagaatgaaaattgcattcatcctacaaagaagtttcctaaatcattacgaattgttctaccttgagtgtagtgagttatctgacactggaggatttaaaccaatggtagatcattacatagtagagatatgaacatgagctaaagcatgagggcagcaaagaggggagaactttgtttcacctaaatggctcttcaaaccttttttagcattagtttctgctttgatatactctattaaaatttgggggataattgataaatcttccaggtggtttatggatggccagggaggaaatttgccattgttttaattatttaattttatttgcctctgtttttacacttggtaaaaatttggaagtgtttcagatagtgaagaaaaaaaagaattaagaaaaacattccaggccaggtacaggctcatgcctgtaatcccagcactttgggaggctgaggcaggcatatttcttgagctcaggaatttgacaccagcctggccaacatggtgaaactccagctctacaaaaatacaaaaattagccgggtgttggtggctcgcgcctgtagtctcagctacttgggaggccaaggcaagagaatggcttgtgcccgggaggcagaggttgcagtgagtcaagattgaaccactccactccagcctgggtgacagaacaagacgctctctcaaaaaaaaaaaaaaaaaaatccatacttcctcctcctaatcattgataggtatccttcctttttttttgttgtttttttgtttagttttgttttgttttttgcctacgagtatgtaagttcacatttatgtaaaatttatttctcatagtatatgctatttataaccattttccagttaatatgtcatgagcaatgtatatagttgttaaatatttgtacacaatataatttttattgatgtatatttcctcatttcttttttaagtagcaaaccatttcctcccagtcttcccttagttttttataatctctcaaataagtactaaattttcagttttgcagtgctgtactataaatcacaggcagtagtactttgctttttacaacagattagtctctgtatgtgtatccatttatttctcaaacacttatataagtgataaattggctgtgatcatttcagtttgttttaatcctgtggatataatatttttctttagtttttgaagaatttattttagaaaagctttattactttacaaagttttcttatcaggggacaattggtaattattatactctgtgtagcaattgtgttatatctaatctctttccctttaaagcctgaatgcttccaactttataatttgctttagagagcccagtttaccctatggctgacaaatagcaaacttaggatatgatgcaagatagaacatgataatgattcaaaacagaaccataagcaggtatttttgctatttataataatattttgagtgtatctagtaccttttaaataatatagtttaatggaagaatatagtacagtggtatattttatagtctatgtatggctctgaagtgtatccagagtttactttttaaccttaaataaatagatgattagaaatagcattaagtgtatttgacaaacctataaatttcccgtaaagaaataagcaagtgtatgtattgtaaaagacagtctttcctctgacttaatgttgtatcaggggcatttagagtctacaagaacctaaagtaaattttatgaaatatctagtgcaaaatctttgggaaatttcaaaatttatgctgaaatcaccatatttgtttcctttggtttctctaacaaaccaaaagatcaacattgtctcatgcgatttatcttctcattccttcctaaaaatatttctggaaaattaatggagctggaccaccaattcttcaaatattgaaaactcaaaatctaagagttattttaatcttgaaattaatgaaaacaagttaaagagccttgtctaagtcaaaaagtcctcagcaaagctggtgataattattatactccaaaaaaggtgaaaagataatggcttcaaatcctgccttacattatccagtcaaaaactaatataaaaatagtcaatatttaagcctatgttttcatcgtaagtaatcaaatacttacatattattaatgtctaagggagtggaagttaaaacaatgaaattcaatcgggtcttctttaatatttacaatttttgctttacattagcaattcaggtttcactgattttaaaattgtgaacaatctgaatttgtgtggatttatttgtggtagttaaaagtaaatattaagtgcaagctatttgccaagagtgttctaggtgctatgtttgatttaggaggtataattcaaacatgagaagtaggaaaagatccctcagatccctgtcctcagaagaattgacggtactttcagagatatcgacaacataaaagtactatgagaggaaagcagcggtgcctgaggtgggagtgatagctagataaattattagtgaaccaaggttttcagatgtaatgtttgtctactcaaaaagggaatcaattctctaagaatttaaacccatataatactatgaatgttaaaccagttgggtttatggtattaatgatttaatacagcaacactgacaaaatctctttttctccctttagttccagttagtaaatatcatattttttactatttcagatgccccgtctctgactgccaaggtggtaaattatcacattttactgtatattcaaatgttaattactaaatggcataattttaacaattaaatttactattttgtgagccaactaacaacaatgatgttaagcataggatgcccaatataataataagcaccttgtatgtacagaagattttacatgcacaaattcatttaatccacacaaatccgaagtttcaggtctgttttacaaattttgtatgcccaatgcttagagagatcaagtaatttgataatactcttatagggaggatccaaacccatggttttatgtatatttgtttgtttgttttttgcttttactttagaacagtttctatacattgtacaggttggattgggacagaaaataaaatttagaagctgtttttattgtcaacaatcttataattaaatatatctgcaaaatataaatataaaacaagtagtctttattatctggaaataaatgtgaagagcatatttaagcaagtgatgaataaattagaaaatatgcaggcagtaaaaaatggttaatatcagtcatgaatttaattttctaatttatttttgaaagccataatcttcataaaataattctagaatttttttcttcagccaatcaacagagatcatccttttaatttgaaacttgtttttatttttaagatccctttgttgatctagcaagtggccaagttcctttgcctcctgctagaaggttaccaggtgaaaatgtcaaaactaacagaacatcacaggactatgatcagcttccttcatgttcaggtgagttggctagtaacagtaacaataataccttattgttatatagtgctttttgcttttcagaacaccttcttattcattatataatttaatgaatgttgtccacccaagaaagtattttgatcatcattgcattttgcttataaagctggcattgtgagaggaatggctacagaactgcctcattgaaaagaaaaatattaagcttaatattatctttgatcactcagtggagccacttctttgattcaaaatgtattcattatctaactttcattttgtctcagatttaggaaatgaggaaaatctctttgtacattgcaatgctgttttatagcaatctctatggaattaatactggcaccaaactattcattttcttagcttatttagggctccaaccagtgctgcactgacagccatcaaatagaaggatgtaccatttttgtaaatacaagtcatactcacaaccgttaataatggaatgctgcttctttgcttcttgaggaggctttccctgaacatatctaaatagctcctatcttctgcagttattttctttccttttttgctttatttttcttcatagcacccgtcactacttaaaattttgttattcagaattcatttggttgattgttggttatctgtctcgtctgctaaagtattaacactttggagataagaatgttgtctggttcactgcttgtcctagtcagttcaggctactataacacaataccatagactggattgcctaaacagcaaacatttatatctcacagttctggaagctgggaagtccaagatcaagctaccaacattcagtgtctagtgagggccctcttccaggttcatagataactgccttcatactgtgtcctcacaagggcaagggagtgctctgggatctgtttcataaggaaactaatccctttcatgagggcttcccctgcataatctaatcatctcccaaaagcctcccctccaaatatcattacaaaagggattaggttttaacatatggatttgcagggaaaaggggacagacattcagtccatagcattgctttatcctcaagtgtccaacatagtgcccagcatatgtctctttgatggatagttggggatggatggatggatggatggatggatggatggatggatttgagtggacaaataggcaaaaggagggaagaatagctgatgtctgtattaaactaaatgcaaatatctgataagcaatatttttgtcacatatttgtgaatatcagaagttttcctatatgaacttttgtcttatttcaaaatttttttaagctaaaacctcagttcatagaagacttgctaatactattagcaatacattctgaaacttctgaatcaagataattaatgagctgttttaagaattgtcagtacggtagttcttacgtgctcgatgccatgcatgggagatgcagaaatccctgtgtatttatatgtttaactgcttgcatgtaactcaggaaagcatagaaaatctttttaatcttttcaaattttggccagtgttctcttatcagtttatttctagtcattctaaggtttcatatgtatccatgagtagcctgtaattccagtcaaaataatttgatgacaaaacatgaaagtcaagaaagaaagacaatatctgacagcttctatataatataaggaagcaattttttttaaagaaaatagtattaaaatataactttgagcaaagtgctatgactgatttaaaataacatattcagtaccaccagctctggattaaaagaaacctatactttagttaggggaaaacttgtagccaaaacacagtgttttcacagcttctttacagttttctccataataagtgggtgttgtagagcccagaggaacatcattcacatatatgatttcaagcagtatgaatccctattagcattacactagaaatgtctggaagaacttcaaatcacaaaccttgttgaaatatccccgaatagccatttgccagaagcctgaactggcttttacctaagtaataaaagactcctgactattactctgagggcccagctagctgtaacatcaaatatttcaatctactccctaaattctctttacaaacacagtcaaccacagaaaataagatacttttttccaacatatgtttgttcacatgaagttcacaggcctaccaggctgttcactagtttattttacatcagcagagagactgagcttgccttctagatgaggtctttccattcaacccttgagactgaatgcatatgcgcctttaggattctaatagctcttattttgcagtaattaatctgtttttattaaggcctttttaagatgaccaaatggggttctggtatgattgctctgccttatgaattcaagttctgttatcacttatggctgtctaaataattgatagtcatttatgaataggcttctatggaaagtatatttctaaagaagtttaaaatgtagtttcattgattttaaaatatctcccttgttttcttatctaaaaagtatgtctgcatgtatatgtatgtctacatatataaagagccttctaaatgtttattcctcccaaagaaaatattttatgcttttcttaaagtttttctaaatgtataattgaaatttaaatatatgaacgtatcataggtagtccagatataagaagagcttaccagcccatgttaaattcacatatatcggtatataggacaaacatttttgctagtaatctgcttgtttctttacatggatgtattattcacatggggcacatgtctcttctatctatgtgtgaggttttacaaatttctcagtttgcttttctcttgttgtaagacatattgtactacagtttgaataccattctttgaaaactaaaaggctgtattaatgaagtgcaccattcactcttgaggtgatttttcatattgttagtatttagaaggaagttcaaggtaacacttgaaaacaatgcttgattttagcacaactcaaatgtgtttgaaaccattaaaagaccttattgccaaataagccaatctcattataaaataaaggagatctcattacaaaatgaattaatttcaatactaccattagtttactagcttaaaggagaattgttggaatgttgaatacattttatattaggaccaagtattcaatagtttatctctgttaagatctcaattggaaatcgtggcttcacttcacgcaagggttggaattttaaggtagattatgtgtctttaagattttgtgtttcaacaaaggaaatggcaatgttgagttttcccacagtttagctatgtgaaatactggggcttacagacagcttcagtttgaaagccagagaacctagagttgttttccttacaaatctaagattaaataaccattttctggatatatttaaaacagtgtatgtgaagatttttttatttgtaatttagtttattaaatcatgtccttctataggcagtatttctttttttttgagatggagtctcgctctgtcgcccaggctggagtgcagtggcgtgatctcagctcccagcaatttccacctcccaggttcaagtagttctcatgcctcagcttcccgagtagctgggattacaggcatccaccatcatgcccggctaatttttgtatttttagtagagatggggtttcaccatgttggccaggctggtctcgaactcctgaccttgtgatctgcccacctcagcctcctaaagtgctgggattacaggcttgagccactgcgcgtggccagcagtatttctatagaggcagtaattcaaccttatggcataaaaatgaatcccagaattaattgatccaacttctagtagaataacaaagttaatcataatgtgtttgagatttcttttattccttgatcaattaagtgtatttatatttttttctaattctgttattgttatagttgagaaggtcagtagtctaagagttttgatatctgtcccaagaattgtcactggtttactaagtaaatttagacagtatgtttcagataatatatacaatattattttgtctaattaaaattcgttaagtttgttaagcatttactatagtcctgatgctttgctaagtattttagagacagatatataattttttttttttttgagacgagtctcactctgttgcccaggctagagtgcagtggcacgatcttggctcactgcaacctccacctcctgggtttaagcagttctgcctcagcctcctgagtagctgggactacaggcgcccaccaccatgcccagctaatttttacatttttagtagagacggggtttcaccatattggccaggctgatctcaaactcttgaccttgtgatccgcccacctcggcctcccaaagtgctgggattacaggcatgagtcaccacgcccagccagatacagatatataaattttatataagttaatattatatataattgtatttatatagttatgcagtaaaatataaatattcatgttattttatttaataatgtatattttatattatctgtttataattatacatttatatatttgatattgttatacaaatatatggttatataatatggtatagatataaatataaatttatttttactgtgtaatatagaaatagatataattttatttctcctaaccactctgaaatatatatatgtgtgtgtgtgtgtatatatatgtgtgtgtgtgtgtatatatatatatatatatatatatatttatttatttatttatttatttatttttttggagacagagtctcgctctgtcacccagcaggctggagtgcagtggtgcaatcttgtctcactgcaacctccacgttccgggttcaagcaattctcctgtttcagcctcccaagtagctgggactataggcagtttttatatttttagtatagacagggtttcaccatattggtcaggctggtcttgaattcctgacctcaggtgatccacctgcctcagcctctcaaactgctaggattataggcgtgagccactgcgcctggcctgaaatagatactattaatgtcaatttatagaagaaagaaagacataacaaagtttagtaactaactcaagctgctgcagaaagtgtaagcctgatagaatttacatcagtttcagttttttaaaaatttgttaataaagtttatgttgttatcccatcatcatgccagaattaagttagaaaaaaatgtacacatgcatctcacgtctccagactgagtttggagatgttcagtggtaaaatcatgataatagtgatggaatagtagtgatgacaaaataatgaagggttttagaaatagtaaaactgtactagaaatttcaaaatctagattctgattatttttcacatgaccttaggaaagccactcactatgtacttcctatatttttcacatgagcgaaatcgatctctggttctcagtcttagatacttgtgcagctgaggcctttaagagtatcagaggagatctgagactattttgttgttggtggtggtttttctaattatgcgcatattatacacgcattggaaaataaaaggaaattacagagaaaacaattaataagaaaaagcaatcacttaaaaccctatcttcaataaggaacattattgccattttcaagtgcagccttctaaatgttttgtctatgcacattttcacttacgatcttaagatcatactcaatatgtcaattctatctcagttccatttaggagtattataagtattttaccacattattttaaaaaataaatgtcattttaaattattgtatgacaatccattatttttatgtactatcaaatactatttttaacattttgaaagtctaacagaaaccctaactttatatactagaaaactttcacattaaatccctttgctgtgacctagatatacagaagctcagtgttatatttattgttgaacatgatccagtataatagaaaatgggaaaatgtattcatcaatacaatagcatttgcttattagacacatctttcagaatatagaaaaagaaaacccaacccaatctttagatgatgaggggagtaataaagactttttgtggcaaaataattgacagccactgaaatgaaatatcctcagttctttaaatggaggttatgtagatatacagcagtgcgtctcacttaaaaaaaaaaaatatggtctgcctacgggccttttggacactttttttttttttcctaataagctttctgtccccagcaataatgaaagtttaaactacagatgtgcttagtagacatagagatagaggtatatctctatgtaccatggctctttggaaggccacaaaccattttaccatctaaaattgttttctttcatcccacaagaaccaatgattgcccccgtctagaatgtatgacctagagtaatcattctgggtattattccaaccatgttaggctaattcccatgcaatccaggaatgttctgtttgtcactctgttggaggctgaaagaatgagggtcgtgatcaactcactataccactggaggctatatgagtgaacagcaaactgttctcataaaagcagaatgttgacaaactgacaaactgcatctgctgcccaggaggaatgctgagggcagtcacgacccaggcacaagtgttgcttttgattaggcacatctgaagcctgttaacaataatgtgaacctgtgatcagtcaagcagctgaccaatcgttacctcctcatccctgctctttctacccaataaatacaaagggctatggaagctcagggctgctgcctttgctcacttcttcttcctcagaccctttccttaaaacagtttcttttgttttttgttatcatttctaggttcttcccttagttcagtcttgtaatgatggtctcaggtagtaacagaagtaactgttgtaatgactgtctcaaatagtaacagcagtaactgtgatagtgaaggtctcaagtagtaacagcagtaactgtgatagtgaaggtctcaagtagtaacagcagtaactgtcatggtgaaggtctcaggtagtaacagcagtaactgtgatagtgaaggtctcaggtagtaacagtagtaactctcgtagtgacggtctcaagtagtaacagcagtaactgttgtagtgaaggtctcaagtagtaacagtagtaactctcctaatgacagtctcaagtggtaacagtattatagtaactgtagtattgatggtctcaagtagtagcagtggcggtcggccacatcactctcttcttttatatgctcagaaaaggaaagctgaatcaaaatttactcctaaaccagggcttctcaaatctttctttctcaaagaagagttgacagtgaacaacacaagggctgggacattaggtaaaagaggacaatatttagttttttagtgcaagacattgtttctattttgtctcaaaaatttgtgcaaactttatattttactccttagtgtatctgtattcatttcagtgctttaaaatattaatgaccttatatcttttaagaaaattggtaacccagaagatgtactatttatattctgtggctcacattcttgtacttattttgataccactgcaattactcataagagttcaaaaataccatgaacatggatggtagcactagagcaaacacatgcttttccaaaataactatttttaaggatgatgtatattcaggtacagaaattccacagggttgataaaatttatagttatttcagtgtgctcccaaactgcaatataataatcttaggggaccagaagatagtttcatcttcatttcattgcttccttccactaccctacacattcgaaagtgctaaagtaaatgaggacctggtgtaatccacttttaggtactgtgaaaaagaaaagtggagaaagtgaaggctgcgtctgggctttgggaagagacagaaagagtaatcggttctaagcaatttgctctaatggtcagtgtggaaatgatctcctcctccccactttttaacagcttccactagtagttcaggttgcaccagatcttgctttttaatattctgctagaaggctttctgtagaatcagatactcacaacaaattttgtgttctttgttctttcacacttctctggcattcctgttatagtaattgctggtttatagcatttgagtatagcacttatcattataaatattaattcattgttctttctttttaatggtctcctcagtccatatactgtatattacattaattgttatactacctggttgaaagggataaataatacctctaaacacagatatataaagtagatttggagaatgagaattgtgaaagtaaattgcttagcccaagatcttagcggccaaactgagatttaagattcaattgccagttataccatttattagaggcattcgtcatagtattcatcccacttgtatacacagctgttcttttcaaacatgcctggcattcatgtgcacatctcagtatcctggacagacaaaataacaatattaaaaatctcttagaaaattacccgtagaaaacaagttaattgttttctaagtctaggtacttttgtatcaaagtctaggtacttttctcatctaaaagtgtctcagaacagacatgatttaaatgtatgaattttttggtaattgattaaaggaaagctttcaataatttctaatagttttgaaaatgattaaaagcaaaacataatttattgtccattcctgtatgacataatgaaaataataggaaaataaatggaactacaaaacatactaagaaacgcagtttatcagacgataatagtttgagatgtttaattacagatgcaagaaacagtacagatattagcaagaaccagaaattatatgttcttatatatgggcatactttaatatacattgtctacagctataatattttctaaaactggacattttgttacaaaaaaggaataatttaaaataagactgtcatcatggccggacgtggtggctcacgcctgtaattttagcattttgggaggccaagatggaaggattgcctgaggacaggagttcgagaccagcctggtcaacataatgagacttcatctcatttaaaaaaaaaaaaaaaagaagaagacatcctatttgatgtggaaacaaatgcttttatcctagaggctttgttttatgtatgttatattgatattgctataattgtatataggatgatgtttttacaagttaccttctcctggaaaaatatcatacatcttttgatttagaaaggaaaaatattgaataatacatcagattagcttttattatttacgtttattattattgaaaatatcagcttacagtatctcctgaagccattgggaaagttgctgaggcagcaggagtggggagacaagatgggaacattaagcatgagacgtttggcttttaacctcacatcaccattcacttaactctgtccttgaatttattgtttggcatttgtcagtggtctgagagaaaggtattaaatattgttgtctagatagtcttaaatccataagtgtatttcatgacataaagatgacattttaaaatgtatatatgggccaggtgcggtggctcactcctgtaatcccagcactttgggaggccaaggtgggtggatcacttgaggtcaggagttcaagaccagcctgatcaacatggtgaaaccctgtctccactgggaaaaaaaaaaaaaattagccaggcatggtggtgcacgcctgtaatcccagctacttgggaagctgaggcggtagtagaattgcttgaactcgggaggtggaggttgcagtgagctgagactacgccattgcactccagcctgggcaacaagagtaaaactccatctcatgtatacgtatagtgtgtgtatgtgtgtattttttgtctaggcttttgagataaagtgctatacataaccaggaaatacatgatgaaagtgccctgtcaagttagctagcccatgacctgggaccttttcttttttcttaaggttactctccattcatgggtgccaatgtcattggtttaaattggaggctgtattatcaccaagggactaatctagaacccaattctctactcctaatatttcttctaggtttgctttttcttgagcaaaacttcctacattgcaatctgtataaagtatttgagcaaagcactgagtttccttccgttcagcctgttgactaacagtagagtcaaagcatctactattttgttttttttttctcctagcatcagtaaggcacagattattaacttgaaaaatcagctaggaaaatgctacagagcatctgttttagagcagttctgctgtgacatggatgggactcaggacctgtggggacgttctgccatggctgtttgtgagcttgtgaacaaagtttcctctcatagaaacctcccaagattgttcctctggagaaccatcaaccagagcctgtgctgtagtagagtgtgaactgtattgctaaacaaagtgaaaggcttccctttttagatagttattttaattattttttcctttctctatctctctgaccacatatggcttgaagaataaaatgtggaatagagaaggagatgtgtaaatttctcagtggaactaccaacacactgtaccttaattttctgttgttcaaaatgaggataatactacctatctcacaatagtatggaaaaattgaaaaaaagtttatttgtaaagaaaacaagaaataatatttccataggaaatgagataatgctgttatgttatcttgccttcatttttatttcactgtttaaatagtatctctctttaaaaatctacacagatggttcacaggcaccagccagaccccctaaaccacgaccgcgcaggactgcaccagaaattcaccacagaaaaccccatgggcctgaggcggcattggaaaatgtcgatgcaaaaattgcaaaactcatgggagagggttatgcctttgaagaggtgaagagagccttagagatagcccagaataatgtcgaagttgcccggagcatcctccgagaatttgccttccctcctccagtatccccacgtctaaatctatagcagccagaactgtagacaccaaaatggaaagcaatcgatgtattccaagagtgtggaaataaagagaactgagatggaattcaagagagaagtgtctcctcctcgtgtagcagcttgagaagaggcttgggagtgcagcttctcaaaggagaccgatgcttgctcaggatgtcgacagctgtggcttccttgtttttgctagccatatttttaaatcagggttgaactgacaaaaataatttaaagacgtttacttcccttgaactttgaacctgtgaaatgctttaccttgtttacagtttggcaaagttgcagtttgttcttgtttttagtttagttttgttttggtgttttgatacctgtactgtgttcttcacagaccctttgtagcgtggtcaggtctgctgtaacatttcccaccaactctcttgctgtccacatcaacagctaaatcatttattcatatggatctctaccatccccatgccttgcccaggtccagttccatttctctcattcacaagatgctttgaaggttctgattttcaactgatcaaactaatgcaaaaaaaaaaaagtatgtattcttcactactgagtttcttctttggaaaccatcactattgagagatgggaaaaacctgaatgtataaagcatttatttgtcaataaactgccttttgtaaggggttttcacataacatagaggagcttcccttttttgtttaagttttgtaacctttaatcctccatattctcatgtctgtcatcccaggggtgtcacaactgtaaaaatctacaatattagaaagcagctactacagatgtggaagagagaacacttgtataagacaatgctgtactgaagttatataacaaggtcccctgatacttatgcctgcattactttgagggatgctgaatgagaggaccatctccctgaaatatattaataattttcagataaaattatgaacataacataccttttctcaagtggaattagagttcatttcccatttaagtgattacactctatctcctaagagctgtgggaaccagttcatattgcagtggaaacattaactcttcgttgcactgttgagtgtcaaggctactgtggcaatgttttttgcaaagttctcagtaattttctctctgcaatcaaattagagttcatatttaatttgcagattctctcattcattgctccacactgctttatcaaatcaggtgaaagaaattaatgtagttttgcctattttacaaaatggtggttggttctttaaacaccatgttattactcttaataaatctacaaatatttattgagcatctatgatatgcttggtgctgttaggcactgtgtttttaaagcacaaactctcaaaagctgattccagcgtaatgttttatttttgtttttctgtgttttttatgacaaagtctgtctgatagacaaagcctggaaggtttcccccagggctttagaatttagaattagctggttttcatttcaaatgggaaattaatggagaaatgagataaaatcatctctgtgtaaatgcttgaacccacagaaagttttctaaatatggactaattgtgggtttgtgcatatttctgtgtctcctcttttcacttcacacccaccatgatataaaaagatgcatcagagagtgagcctgccttcaggacctgaaaggacatgactgaacatctagtagatctggtggaaattaatgttatacaaaagacacgtagactaagttgaccctgggagaggagttaatacattcctttgcaaagtgacatgtgccctttttttgacagtctggctttcatggtatgagatgaggactcacaggccttgggtaatttctgcttttgtatgaattttttcagatggttctgagctggttatgtccctggaggggaatttttcatttgccttagatgttcttcccatgagtaggtacatgagtgaagtttcttacacttttaaaattgcattggcaaattttcttttgctttatgaacccctgttttgtcattatgatttttcacttgttttaacagtttcagatgtcaccttggaatagcactgtttattttggcctttttatgattgctgatgataggtacagtctaaaggccaaaagttgccacttcattgtgataacattgttgcaacattcctaatatattagagaatgatgtaaaataagaatgttagagaacatagcacattctcattcagtttataaacaatatttgaaaatttccagtgagaattaaaaaaggactagtgatgatatagcaaacctggacctgaaatttgggggtggggggtggggggatatctgttttgcagagaaaatttaccagcctccagcaaaatctctgcatcttgtactcaatagcaaccattagtattgtcatttaaaaagaatgaatcaaaaattcatacgtaatggaatgaaaagaggaaaactttctattaaacactgtcaagaaagacccattgctatctatcacctatgaaattaaacctaaaaaaatttttttttattgtaaaagcgactgctcgttgatgtctggaagtgatccagactttgtttcactgtgatccaaaaagttagacattccttccatttctcaagatttggtaacaatttttttttaagtcagcatttcatataatacataaaattaagacaaattaacttactgatatgtggccaatatcaacccttctcacccaacccaaacatgttctggagatagaaggacttatcctcaattatattccagtaaatttatctccataatctgttttatcccctaatgtatgatatatctcaccaaatttttctagaattgaataaaagcagtttttgcttaacttgaatttccttccacaaatacaaccttcagctcttccctctctgtttcccttttgcccacattgcaaatagtcttcataatagaaccctcactgcaacttaaaagggtcccatttcttaactcagcatttcatataccaagaacacttgcaaagatttcttcataatgtgattttttaatttttcagttccagaagcatttcctacagttcgaacgttattttttctctcagattttcaacttgaagctttgatttgcactgaattaacttggataaaattttagtttctctcttcagctaacagatttggaagcaaattacagtatacttgaataattcaggtactacctgttgacctggaattttagtgattctgggaaagttttccagacaaagacaccaatagagtgaagggttttttccccaattactattttattgttttttaaaatgcctttttaaaacttgtgtgatgtggcaaaatagtcatatgttcaattaatttatattttattcattccttttcaattctggttattatgtaacctcaagtactttatctgttcttttaaagtattttataaaatgaacgttaactaaa

SEQ ID NO: 8 - DNA, 176818 bp, Mus musculus
cttagactcccgctcggggcgctcacgcccacctgcgcacccctcattggttagctccccggcgccttgctgctactttttcagttcctttcctcgttccacttttgttccaggctagcctaggtccatttcccaacgagttcttctccaagtgggacgcagtggagtgggccttcctctggggccattgtgtaccgtggaggacgtggactggggggtagcgcgggaggagcgtctcgtcccgcccattggctccgcccgctgtctggcagaaagcagcctctcaggattggttcgaagactcaaggctccgccttagctccgccccacgccttggtctccggggatggctcaggggtggggtggccagtgagtggtctcctcctccggcgggcgctgcggcggcctcccgagtgtggcgcgggactgccgggcgggcgtggagctttttgcacggtaattgccgcgtccccgcgtctcggtgttcctagatctcggtggctccttccccggagcgctctcctagggcgattccacagagtccccacccgagccaccccagccagggcagcgtgtgtgtgtggagtgggacccgcgatcacgcgtggctcgggacggccgcggtgacccgagtagaggaaggaatgggtcatcccggggttggacgtctcttgctggctcgggggccctgcagctgggcgcgggccatcagggagaggggacagccctagcttccagctgctgtcgccgctgcgggcctgagccaagtggggatttaaacagcagtccctggctggcccggggcccgggagggagcggactctggctgatcgccgccggtgggaggtgcgtgctactggcgctagatcgggcaggctgtgggattgggaagccaggacggggtctagggctactttatctttgctgagttcctcgtctctttcccagacccctgagtggcgggctagaggcccgagcctggaaagggtacagacgttctgaaacaaagctttggaccacttgataccgggtaggcagaagagggaccaccggagaagtgaactccgcggtgcgtgcccgcccttgccgggttctcaccgctttttaagaaggggttgcttgttggtttgtttatttggctctagggaaaaactactcacctcactgctttaaagaactatttgtgtgtccgcagctgctggcttttgcggggggggggggtgttgggggaatggagaggggacgcgcgcgcgcggggcgcgcggggggggtatccaagtcctccgcctttgttgacaagagacgtgtcccttttgcgtgtgtggagtactttgcatttatgtaataacttggcgaaatcaaacagcgtgaaggaggctactgaagtgaggctcccaacgtgaattttaggagttgcagctctagtatttcgaatctggattacagcagaaggggggggggggacgacattgtgttcttacctgttaaaagttgttttgttgatgatgttgagctgtagcttcatagaacacgggcagaggatgcatctttaacttttagtattgtaagagcaaatcttgtgtcatggctcctaacttggaggatgcccttactcagggttactaaaaagttgaatctgggaccctgggctttgtcacagagacagcggagaatatcattaatgggtacaagtgagcctgttcagttcaggttcctgttggggaaatactttcatatccagctaacttttcctctcttgaaattctatcttgcaaaaaggactaagattccagatggcaaattctatgaatggcagaaatcctggtggtcgaggaggaaacccccgcaaaggtcgcattttggggattattgatgctattcaggatgcagtcggacccccaaagcaagctgcagctgaccgcaggactgtggagaagacttggaaactcatggacaaagtggtgagttcagtcagtgtgtgtacacggccctcagcaccctgaatgcgatttcttcgggttttatttatatgtatggctaataatcactattatggtgatgagctttgtatttaggttgggccatttttcttcaactctgtgtttgcaaaagttgaattcagaggaaagacttttatttttttattactctttctaacttattatcttgcttttcaagttccagagcccctgggtattactccaatatgcagtttataccattggctacttttgctgggtgtatagtatggtttggaagtttgcttagtcttatgtggagttgccttgctactagataatataaggctaacaagtgaacaataggctctgctggagcacacttaggacaagcacatgggtgatgttgaaacctttactggggaaagaaccagaactccagggaggattcagtattgaagagtttgatttttatccctgtaaactcatctttattaagaaaatatatacatatatacatatatatgtatacatatatatgtatgtatatatatatatatatatatatatagtctttactgttcaggacatcggtacagtttctttcatctatgattccattttgaaacagggaacctttttggttgtgcgttgtttattgtgaaaggaaaatgtatgctggaggctgtgtggggctgagagtgtcagaaacttctgtggtttttttttttttttttttttttttgttgcttttagatgagctctagtttcacaggaagaaaccaaactggatggcagttctcagtccagttataagggcagtgtgcatacctcccagggccctgctggaaaagctagctgtctgaggaggcttgggacacagatgtgttggtgtccttctcggcacacattcataactttatgatgttgagaagaagttgggctatgctttgctgagtttgagacattgacaaagatgctccttttgaatgatgaacaaaggcgtgttgacatcatttggtgtcatttaccttggctttggtttgctaccaaagacaaaattggctacaaagaagccactgagaagaagtaacaattctgggaggtgacactatgggctttattttcatgtattcttatggagattgtaggtaagataactaaaccatggccctgccattggatggccactgatatcaaacgcagcgccagagcattttttttaaccaggtaaatagccttagtatggggcttcagtgtgacctatttaagcttctgccaatgttttcacattgttatgttgaagtgctccagacggaatgacgtcatgatgtcagaacattgcaacttgctgcttgggctcaggttttggatttagctttggacacttcggactgaagaattgtgcagctggaaaaactgcatgcatctggcaagcacatgagctgtcttttgcttttctactgagtcttcttctgaaggtcacccttactgcctgagtcattaattggtggtaggagaagaaattcaaggtttgttccagtttatctgttgcataagtaggcaacagatgggtgccatttcaaaagggagttggtccatcagcatcgtttcttgagatgtttagtatttgtatatttgcgattgagctctagagcataaaaaagatttatatggtggcgtggtgagcaacagttactgtcaagtggtcagtgaaatagtaaaaatgaagtggtatgcataattttgctgcataactggttgttaaccagtacattaatcgcttctaattatttcaccatgaattacagtaaatgcctggttatttgacagttaaacacctggcattgtccattaacccttctgtgggttttaacttggcttctacagctgagtttgacccacaaggaactgttttaccccaagtctctacttagtgggatgtgggtgccagtgttggcaaagggacaacaatatggctttccctagtcatcttcattatttgtcatagatgacaatgtgcatacctctgtggctttgtggaggaaactcccatcatttgtcaatagagtttggtctacttatttctactcttcacacgcactaagagtaaggcactggaaatgactattaccaattggcagcatattatttgaagttgggatgtagatgtcttccccagcatgggttcatctccttctgtttgacagtgatgaaggaagtggatcataatagcaacactatctggtgattcttcaggaaatttattactagtacagaaatatgaccatctgctgtatgacctagagaagcagcagtgtgagtttactttgtgaatacagaacagaaggtttcacgtctgataggttgttaaagaaaagtcaggcttaagagtgaagttgcaccgttttctttatggaacctctttccctggggaggtcttcaaagcattgctttcacgtaattactaagcaccataactcattttaaagggggcagagaatcagtcttgggcagcacaggatatatcttagaagtgtataattttatcattccttgacctctagaacttaagaaactcaactgaaaagtcagttgcaactaagtgttctgttttcccagggcagccactctttccaaggtcacccagcataggagaaaacagttgttccttgtgttctttgtaagttgtgtaacgtttttgtaatcggtagtgcagagttcacagtagtgcatgccctgagaaaataacaaatggtgggatcccaaaagcataccccttagatagttttctggtcttagttcttctgatgagtctaagagactgactctaaagccataacgtcagtggatggctcattgataacactgacagaactattctagaataatacacatttaggtttaaatacatacaaaatcgtttgtagattttgttcctaagttgctacaggcatgtttccatcaacccttaaacacttattgagggtttgttgtgtgtcactgagtgactattactgggggtgagtgggcagactaggtaagccataacctatttttggcctgtaaaccaggaggacaggattagagctggacaagagttgtaattgccatggggtgtgaaaagggctggggtaaaaacctaaaaaaaaaggtaccttggtgtcaggatagaggatgcttgcttccctctggatttcagtctggtttctgctgccccagccttttaggaacaacattattctgctcctgttagaaatgctgaagcgaggggaaggaaatggttgctcatcggtgtggttggagtcatcatttattaatgtgaggttcctgagtgtggtttgcacagagtctgagccaggtgatggaaaacagaagaaagcattttcctcctaatagatgctaaatgcacagagtgtacatggatgctcgggaaattaggaaataattacttgatgataaagagccaagcaagctgagtacctgctccttgtcttgctccacttgccgtttatttgaagttgagttggtgcaccagtgttagatgctcttagaaagagatgctgtcactcggcgtttgcttgcctttcacctattgtataccgcttagccttaaagtaactttgtgcgtaatctcaccagaattaaatttaatgtctgtcaaagatgcatgagttatgtacttatacatatttttaaaataatagtaccgtaataatactttttgcaaggtgagttcttcagtacatctgagaaagagtctacaagatttaaaatatagttccctgaccagctcctgacagcggagcagctgtgctacccaccacggggctacatccccagggtatttctgactttttaaaaatttagctctatttcctttttctttgcaaacaagatctctaaattgcccaagaactctctcttgtagcctagcttgtaggctttgaacttatgaccctcgtcagactccatagtagactccatgatatacagtcctatatcatcagacatgaaagttttggatgctaattctgtctgtcagctttccagagcattaataaagggaacaccattgatttgccttatgcatggatttccttttctttcttcaagtccttcattagacggatcctgggccccattaaaccttgattgagtttaataacacactagctgttggggcaattttgcttatcactgaattacattttgaatttgtgctgacaccattggcttgattctaaagtttgcgactagtgacacctggaaaagctttatttgccatagtaaaagtttgaaagtagatctgtgaagagttaacttggcctatccctgtaatagaaagcaggcatataatggaaaccttaattgtgactgatttgttaactcttaaaaatattttagccgggcgtggtggtgcacgcctttaatcctagcacttgggaggcaaaggcaggtggatttctgagttcaaggccagcctggtctacagagtgagttccaggacagccagggctacacagagaaaccctgtcttgagaaacaaaacagacaaacaaacaaaaacaaaaaagaacatttagattttcctttcttttaaaagtttcttatatgctgtcaatttctttatcttcccctcccccacacccccaaattctagccctggacagacatcgtttataaataatatcatacagtatattaaataagcactataacatgatgcaaatactgttcctagtaggtggaggtgactgttgcttgctggaggtgagaagctggtgaaaggtgctgtctgtgttctaaaagattgtttgaactcgaggggctggaaaacatctttcaccgaaggaatgaagagaggctgttgtgtgagagtaaagtagaagaggatggtagaagtttcaatattaccaaagaatttggatccagttagtttggtaaacatataaagttttctgaggggggggggagagagagagagagagagagagagagagagagagagagagagagagagagagagagagagatcaaggccagtctttcatgtgctactctgcagagtctgaaggttggcgcaatgcaaggaagactagggatgggatcaggaggagtcacagcaatgtggttaagaatttataaagacctggtcctggtctagagacttgacagtgggttgggtttagcaagtgtgtcacagatgtggaaggttatggggggaaaatctgcagtccccgagcatcttgagggttcccgaaagaaagagaagacgaagtgaaagtggcttgaggttttcaagctagtcaactgtgaaggcagtggagcccttaaggagatggggcccaggaagggaaaggccaaacttgatggttggcatgtctgtctgttgtgtgttgagtatgacctatgagagagaaattgattttgaagtcagaaaattgggtatacagttccgagagaatttgaaaccaggatcatatgtttgtcagttgtgtttctaggccgagcatctcaagctgtagcactgcgaaggagttaggatgcagatctagactcagagacaaaggcagaacacccgtcatggggagcaggagggatatttctttagagttggtaaagagatgggaattaggacatagaatagcaatggaaaggtgaagaaagagcagttgtgtattaatctctacatctaaacatagagaagaggattccttcaacttcttacaaagctacatttaagaagagaaactaaacagggtaaaacttaggaagtcattggatttcctaatcagaggctattgttgactttggcacattgatttcacttgtgatgaggccagggtaggatgtgcgtggagattatttagtggttctacaactgtaacaacagacacagagcaagctgtggtagcttgagggtttattgagggttgaacttattaattttatcgtgtgtctctgtgtctgtccatctatgcatgaacaaggcttccattgtaccagcagaaggaatacatgaaggtgtagattacagtgaggatggagaaagctctatggaagcaactaggagtggctaagtgaggcagacaggtatagtttccacataggcaggagggaaatgagacacacgtaggggcgttttaagtgaatatatacatctcttttgggttggtaagaagtagtgtaagatggtatttgtagtgtttaagccttatctttaaagttgtacattatagaccagtcttccaacagtggagtgggtgagttatatgaattgaagtggccttctggctcctccctttacattaagcatcatcttacgcacatgctgtgatgacaatggttgctgtgccatcttctttgctcctatttatggcttgtttttttttttaaactatttgttggatgccagtttttttttttaaatcaatgaaagaaactttagatattggaccaacatgtacagcttagcatttcacatttgagtagttgttaaactgaatcaaacttgcacacatcagcagttaagttagtactagttcaaagataaaatttccctccgtctttagttcttttcttgagagtctcttaggtttgaagaaactagaagatggccatgtaaactgactaaaataggggcctgccttgggtcttaccccatatagaacacccagactctttatagtggcctgcctttggtctcacccctgtatagaacaccccagactctttacagatttcatgtagcataaaaagttttcaccaacaggaagagcccttaaactatcttgatgttgagtgggctacctagtgcctttatgaccttgtgtttttataaaatctccatgggcttttctttgctgtgatggaatataatgtatgaagggagaagaacaagaaggaaatgagggatggattttcactgcatgttgtgctgagaactgcacttcttatttctctttaaaagtctgtaaatcagtgagacttctagaaggaagcagccagtttggattgtacttaatgtgtgtcccttgtattaggacagtgctgcacactgttgcagggtgttctctttcttacaggaagtaaatcacaagggtgtttattatttacattttgcactaccaaactcttctccaaattttgtattcagttttggagagatttattcaataattttatggttatcttttctctctctctctctctctctatatatatatatatatatttttttttttcctgcaatgtcttaactcttttccttgtagccttctctccatcaaacacatgctgtacttctttttatacaaagtgagaaagatagaccagtgaaaaaaaccagatatgttctccagtagaacagaatacacaatgtgtattttaagtataagcagttgtttcgtaagtggtcctttaaatattaactccctaaaggtaatgtcattgtaaaacgtaacagaattaaacttctcaagattccactataaccagtcttaagctcttggccagttttatatgctaactttattttgcttagctaatgttctgtaaaaactgctgtattattttgtactcactatgtaatagtatgtcttcttttatgtatactttattcttttcctaggaagctgttgagttcaggtagaaagaacatacagacattgagatgctttttagacccgtggctttggtgtagccgagtaagaagcctctgaggtttccagaagaagggctctcacactcttgtctttagaatcagggaccctattggcgtgctcctccctggggaggactacttctcctgctcccagctttagtcacttgtatgcagttctttgtgtagaattgaggcctctgctttggcgtgaacattggtgtcctccctgctcaactcatttttggctggtcatgttagtgagactctacagggacagcttctcgtgttactaggagacacaagtgcccaaccaagtcccgggttctctgactctcacagtgtttctgcccttgattgtgcattgtttcctaagtcctaggtatgggaatgttttagggatgtaaccactaggacttgtccagtgacaaatgctcagccaaccctgaaaacatacatccatgtacaatgtatggacttgacaggttatatatatgaatatgtatgtacatgcagatacatatgtgcgtataacaacaactgatgaaaatagaagttaggagtttgaagaagagagggagggttatatgggagggtttggagggagtaaagagaagagagaaatgtaataaaatctgagagagggggggttcttgggtcttagctcagtggtggtagaatattagggtcctatctccagcacacacatataaacataaaatacgtacttggcttggagactaagtgactcaatatgcttccagtatccatgagtgttccttgggatgaagtacgttttggaatgaaagttatttacagtatagtcacagttgcttaccattgacatgtttttggtttgtaaaacttcttttgtacatttaggaactgatttccactttattttcgaggtgtgctaggtgatctgaaactctttatttaccttttggctggacattttccttaagacacagctaaaaatctttttttcttctttttatttttataatttttattataaagtttttaaatttaatgaaaattttttttacttatttacttcagaaatctttaaatgtaacattccaaagtaattaatggcttgaaaaaatcttatagcaatattaaattctgtttttatgtttgtgccttggctttgataatgttgaaaaatgtctaattatatggtcacatacatctgtttttattaaaatacataaagtatatatatatataaaacaataatgttatgtatttgaatcaacataaactatatgaacatagagtatgcattgacatctttgaatataactaaatcctagtgtctgttctgtagtgtagtctctgatccctaagttagtcatctgggtactgagaagttagtcctaaacagggtgcatttccgtgttttaatgctagcatgccacaacaagaaaagttcttttagtgattctaaaggtttgtaaagacttcagtctcaaaatccttgggccagatgatgggatattcagcttaattccaaacctgaatttcttttttgattaaaaagaaaagagtcatcatgttaaccaattcttttagttatcagtgccagccttaaaatgcccttcattgaataacatagtgaggtttatttctttgtgaaagctcctttgttttcccaccagctttcattgtagggtgcagctcagatagttctagaacttactcttgtggtaagcttcatttttccccttaatacactggttttagaagggctatttttctttctctggctttgccgttccgtgcacatagcaagcactcaataaatatttattgaatggaattgaatttgacctgcttagaagtcatagtcctggggtaggattattcattttcggcaggagcggctataaatcacagagtttagcagtaatccatctgatgaagtgcacacccgaaggcacagagtggtagctcagctccctcaatcctgcctcctcccgtggaaagtttgagcacggggtagctttcagagtcctggtgcgctaaggtacactactccttccaacctccttcgggtcttctgaactgtgtgctgacagccttcctgtgtgcccatcctctagcacaactgcatgatcccgttcctttaccctggtgtctcacaagcctttgtattatgatttagctgcaatatttaggcgtgcgtttcttgatgctcttgggaatgtgacttagccacggcctttctcccccagagctttgcaaggtcctttgtcacacttctaggttctgtgatcctttcttacgcccccagactttcccaccatactgctgcatgaggacaggtctgtgagtgactcctttgtcttccttctgcctgagacaatgcctgttatgtacacgttcttcccttgaactaacaaatgggccatgaagttcatgtaaattcgcaaatggaataaaataaaaatggaaatgagtttagaagggaatcattaattatatgcctaattctaattaaattgtaatatagccagaagaggaacccgagattcagaagatgcaggctcttgtgttggattaatgtttttttaactgtcccttaatctttgtagttcttagcttttttaatccggaaatgaatggattggatgagatcttttctaagatcccttcaagcaagaattacattgctcctaagttaattatatagaacgaggtctcctttgccagactccttgaggcagggagcgtgttgtactcatccgtaatttcctggcacgtagctcagtacctggtggatgggagttattcagagagtttttgtcctttaatcaagcaatgtgtttccatgtgaaattataattggaaaaaaaaagcaagtgactaaaatgtcatataaggaatagtgaattagatatgatatgtatgacactgaaaagtatctaccaaagaacaattacttgtcatgtctaacacgtttgtgatgtttttcattaagtagttaacaaattaaccaatggaacaaatgaatgtgaggctgccctttttacaagttaataattgatcagtctgtgacgttttacaaggacatgttgctaaaattcagcggtgtccaccgtgagaggttggtggagttcttgaaattcacctgtgctctggttgctcttggctttaagaattgaaatactggagcgggtaagatgactcagtgataaaagacacttgtagccaagcctgtgacctaaattttatcccttaacccacatggtgggaagagagaagcgacttaatcaaggtttcctctgacttccactcagatgccaacacacacacacacacacacacacacacatacatacacacacacacacacacacacacacacacacacacacacacacacacacagatcctctttgtcatatatctcagctctgtaagcccttttactctacaaagacttggtattacttaataagggagattccatctgacctttgccaaaaaaaaaaaacccaaaaaaaacaaaaaaaaatctcttgaggattaaggtagtattcttatatttaaattaaacccttacccctcatttgttaattatatacctatagaactcaattatgaaaattaagcaaattatatagtcaaaccatttataaaaagtgtgtgtgtgtgtgtgcgtgtgcgcacgtgtgcccgtgtgtgtggtgtttctttcatttaaggctaggctcacaatttaaaagacaagtgtgtgtgtgcatgtttatacactgatttttttcagtcaactaaacctgtttattacctgcttatttattagttgagtatcgtgtgctaagatcctggccttaggaactgtgtacacagtgggagaaaatagggaaaataggggcatgcaacaggtcattgtgagaattgatttcgttcatggtcaatgcctggcctgacaatttaggccagagtggtttgcttgtttgtttgtttgtttttataaaaaatatacctatgcaaatgtgatagtctgagggctgtttatttcattgctgacaaatttactttgcgttcctgctttctaaagtgattatagtttacctattttgagtttgtgataatacttttatggggtctagaggcaggtgttgaaacctgaaactattgtcatttggagggtccctactaaagtactatataagtctgattatgaaagagaattttctttagtgttaagcaaacaacaaaccccagcaaattaagcttttgaaaagctcccaagactgcacatgttgataaacatgtctgcactgctatctgacaagctgcctcttgcttgcatactcctctgttgcctacatgcgcttcctgccctggcttccttgatcctatttagatagcatattgaaatagaccttctcacgcccgaagcaggacagtcagtgcttatgatatttgcgtgtttgtgtgtacctgaagccttgtgtgtgtgtgtgtgtgtgtgtgtgtgtatatatatatatatacatatatatatatgtatatatatatatatatacacatatatatatatatatacatgtacatattatatgtttcagtaaaagttgtgtatctgtaagatttattgcaatatgatgtacctctgtagagaaagagggagtaaacatgtctgccttgttttgtagtaagagtggctatagtctttttccctagagacttcaatttgcaaggtgacactgtgaactgtggttctctgtgctttgtgtttggcatctagacttgtgcatcccctttgacctctatcccccactttcccttctcctccctgcccttgagagccatcattcgattttgtttctacgtgttttacgtcttcacttttagagtctgtatataaataagatcacatagcatctctctctctctctctccctccctccctccctccttccttccctccctccctctccctctctctctccctctctcgcttatttcagactgccgaccataatttctctatttatggaactgactgcatgctttgcatataaattctctaaacccatactgaatgtctctctaacttggcctcctgttagccaggttccagaaatgtcctttggccactccgttgccacccaaaaggaggttcattgtgatgggaaggaagatgcaggatcatttatttatagtgtttaaaattgtatgctctgagatcttttataaaaaccaaacatgcacaaaacctagaggaaaacacatcagaaggacccaggggccttacgctgtgctgacatgatagaagctcctgccggtggacattgcgcctgtcatgagtgctggactcctaccttatgaatgcaccatgcagttcccaaagctctttttaaaatgattgaattggtgggttcccaaaaccctagtcacaaggatgaaatgaactggtttttattaatggctaagttacctttaccttaacgtgtaaaggtgaatgccgtgtagttttaaattaccacttctttcttctcttcttcttcttcttcttcttcttcttcttcttcttcttcttcttcttcttcttcttcttcttcttcttcttcttcttcctcctcctcctcctcctcctcctcctcctcctcctcctcctcctcctcctcctcctcctcctcctcctcctcctcctcctcctcctccttattttcttcttcttctttcttattttttcctggaggaaagtattttcagttctgcaggcagcccttcctctttaatgcgcactgaatgcatggcacctggtggagtggctgaacggtgcatgtttcataggtcacgtgtttctaggcctattagacactaggaagagagacaggcttctttagacttgacacctgtttaactgcttagtaactcagttgtgaaggttcagaaatagtgcattcaaatattaaagtctgtgaaaaagctttagccatgaacttaatacagaaaagtagcgtcttaaaattagatattcattgattgcttgctttcatataaaaccatattggtgttaccaggccattagtaactactacactgtgttctattagactgtacactctaggacactatggaaaaggtaatcaaaatgattagaggtgaaaatgaggatggaatatagcaaagtttgcctggaataagaaaacgggatttgggtgttgtaagagaaaagtatttatagatactttctaagcagattcaataattcagatcacagattgtattatggaaaggaaagaggacatagctctgttcatttataactttcctatgacagaaaatagtatagtatccataaagtaattttttctttgtttttaggtaagactgtgccaaaatcccaagcttcagttgaaaaacagcccaccgtatatacttgatattttacctgatacgtatcagcacttgagacttatattgagtaaatatgatgacaaccagaagctggctcaactgagcgagaatgagtactttaaaatctacatcgatagtctcatgaagaagtcgaagcgagcgatccggctctttaaagaaggcaaggaaaggatgtacgaagagcagtcgcaggacaggtgagcacgtgggatttgtactgttccttgtgtcacgttcttcccattgttttgtgtctcaaggttaacagaagtgcccttcatgtgttctggggactatgcagtttccttgcctgtttccttttcctattatttaagtttggcaaaagttgaggtagaatgtcgaacctgagccaatggtcttgctattctctggactcctttttagagcacttcatgtttcacagaaagactgcccacggtagttcctgctgcttcctgccaagcaagccgtcttccccagcttacatcttttatatggattttcataaagacatgagaataagcaggtcttctccctagataagccactgacagaacaaagaaacaaagattccatcctggtccagcttggtaaaacagcctgatttggggttacatagcgaggttgggtgactgtgctcatgagaagtgtcactgcagagtaccaccctagcatggatgatggctctgaagttgtgttcttagaatcatatcttcaactacccttcctcttcctatatgactcctcacctctcgtcaaataccaagagccttgggtctcagaggcaatggcagctggactatcagatgctccatttccgtggaggtagctatcacagtatgcttttgtctattttcttgtcatctgtgtggggtcaacgtatcctgtagatgatcgtagcagtatcagttccgggatggatatgtcatgctcagcattgagaatggagcttcactgctgggccatctttgctttagtgtggcatacactaccattagcatagggttcactgtttttattgttctgtggtttacaaacatacacttgtcccatgtctacccataccctgtaaaaactccctgtgttaggctgggtaagtggctcagttgttaaaggctatatatagcacactattaaaatgacaagaaatgttctaccttcaacctacacagtgtgcagtaagtaactgttcagactggtttcttgctggtctttttatagcttgacagcctcctttcttatttcatggatgatgacattgtatgtttgtactacagtttgtttctatactcactcttgtgttgaagggtaccttgatggcttcaaacgtttggcaactgtgttggagctggtaggaacattcaagtcatctggggaaatccttggcgcatggtcattagatcttacgacttgcctgtgtgaattctatcctgacatagtgactgtgttgttttccattcccaccagtaatgagtgagatttcttgatgcttatttgcttcagcatctggtgtgagagatgcagtacattagattcccttcgaatctcttagtgaagtagccgggagtagatgctctttcagcatacatattttgaccattaagtgagaaactggccaggaaagactgatatgaaattaagttttagtccttactttatagtcaggaaatgttctcgttctctgtctccattcttgtctttctctctctgtctctgctctacccctttcacccaccctacaagttctcgtgtagcccaggatggcctcaacttcctttttaaaattttctttttgaaatgtttatttgacatgggtggctgttttgcctgcccatctgtgtgaggctatcagatcttctggaatgtgtgctgggaattggatctgggtcatctggaagagcagccagtgctcttaactgtagagccatctctctagcctggcctcagactttctagatcctcgtggcttgccttgaactcttgatgctcctgagtctccccgctgatgctactggaatatcactctgactctatgtggctcccagtccttgtgagctctaagggcatgaattcaagcaccacacagtgcagtgtagaagagactgggtttactacagagaaaagtagggcactctccagggatgagtgtggtcggtagctgaagtgatcactatgccaacctccattcttagataggctttatctagttctcaaccgtttctagagcagatgccttttctgaggggggatttccccttcagatgattgataggcccacttaagggtctaggcaatcccgcgccccttctttacaagaacattccctaactagatagaagtcagtaaggtctgggtggctgtttagaatgctgggtttccacttgaatccagagataggatcacattccttcgaccagttaagtcctccaactgcagttcctgtttgtcaagattgtgagataggggtctctcctcactaaccttcagacctgccagtgtatacatatttacttaaaccaggatgttgagcttctgaagcaggatgctctatctaggtaagggtgcgttgatggctggcgtctggctctttagggtttggattgaaatagctgtctccagcttgataatggaactgatagctttcaccttttctgagctcctttcaatttagctagaatattaaccaatcaaagaagtatttccagctggaaagctagtatgaattaagatacgtaatgtcttagcgttagctgaattaatttaccactcagtatttaagttaggaaaatctctaagagacatataatctttcatatcagaacacataacctccttggtttgagatggtttagggttgtgtaatggaaaatttagttatctagttacataggctctgaaattgtttgtaagagctggccaaataaatatacagagcgtgcaaaaccatcacattcacgcaccgcaaaggcctctgccagaggtaaaatgacataaatgttgatctcaaatgctttccagctcattctcagtcctagtgtacccgtggagtacagcggttctgtgactctgcgtcctccacttaacgttcttggaagacagtttatatttcttgagggcagtgaacgtcctggctgcctttcaattgtaaagctcaaagcctccccagggcttcagactcagtgagagtttgaatggccacatgattctagcagcaaggtagatggagagagaccatggcgtggggtgaggttgttcttcgggctttacgtgatggaccaagttgttgaaatccagatggtgatgtaaactttttcaaatagtatttgtaccacttacaaaaacaccaaaccaaaacaaaaccaaaacccaaaaaactaaattgcttttacaaacatcactgtaattcctatttagatatagcctcgaagttcttggtattcctgctaagcactttatgatatcaggatgccagcaaagtgtgtaactctcaggtcaagcacttggagcagaaggcgtgttttagctggatgtaagattcaggtgataaactcacatctgacttttacgtgttccaaagaaacctgaagcatgttccaattcagcagacattttataattatcactacagcaactgtcttgcatttacacctgtgtcaaaaaaaaaagaaatcacaggacacatataaaattttgttaagggtgtagagttccacagacagtggtaggtcacataagactggccataaattgcatctgtgcccctggtttaagtatccaggtaaatttaagtattccgaagtcttaaacatcaactgtaagaggaaatacagtagtttgtattctgggatagcatattcccttattgaattttactatcgtctgtggtctctgtttttttgtttttttatggtctatagccaacctttgaaagtacacattcttctgtgctaaataattttctagtgatgatttatagtgaaccattggcatatgacacagacttctgatctgtgtctctctggcagtcatccacttgtgcacattccctgtggagcgtccttgggagtcacaaaactgacgtgaggtacattctcgcccgtggagccctgtggcattttgctttgtagaaccttacgggaaattctaagactgtccgtgaggaagttcagctactgaatatactgttcaggaaaatggccactgatgtgtcaggcgcacaggttattgggaatcttagacatcctttggactgtcctctctgattccgaaccgactcactggtcacagtaatgttgttcagttgacactgaggaacagcagtagaaatagtcattttgaattaaaaagagctcacaccagcactgcttcaagtgagcctctattggataaagttgtgttggatgagtgcctgtgtcgagatgatcaatgtctatgtatctgctgtgtcaatcagtgatggacttctttctggctttattttaaaattaaatgtagatacataaattaaaaagcaaacattgggtcatcagttctggaatgtggagctgtcttagttgactgaattgttcatttcatgctaatgtgatgtaagcatgtaaaacatgtacaacaaaccaatgtagaataagcagacagctttcagtgtatttctttgttagtactatggaaggagtgaggtagggcttttagctaggtaaagtgccagtgctgcccaaagagacatctaaggcaccaggaaactttgttgcactgagaatggcagggtaatggtttctgactcaggaaaggcccatggggttgggggactgcacttgattggtccagccacgctcctttgtctctcttctcacatgttagggaagcaattgaacctcacctggcttgagttgatgtgtcttcagttgggtgtttaacctgttctgaacatgtgtttttgggaagagatatgtagtgaagtgtgacctaagagttcctgtcagtgtgcttggggggtgtagcagtaacttgtagagaggtctacttggggcatgggaaaaggagactggctccagttggtttggggaatgcaagagacataagggttagtcctggggaccacggctatatccctttcttctgtgagtttactggtactttcttcagtcgtttgttttcatagtgaatttatcttccaccagtaaagtgagcatcagtgagctgctgcctaaagcctggtgtcggacagccatgtagggatagtccaggatcatggtttcaggagttatgcctgcaagccgggtctataatcccttccctcccaggagcttcactcctgaaacaagacctaaagttaatttacaggaggtagactaactgcattaggaaagctgtctgtggagaaaataaaggctttaaaagtgcacacagagacaacatagatgttgtcttactaatatcatttttgggttctctttcagtttttttgtacaccagtgtagaagaagacaaatccattcccagagaaaatggagcaagtgctcgtataggaggggcagtattctgttctttcgcatagtaatgctcgcacttattaaggtttaatgggagggtatttccgcatagagaagctaatcctttgagaggccagcctatatttgaactgcagaaacatcaggcagattttcccattgtctactgactaagctgagctaaggaaaacctgttatctgctatgttaatgagctgtccttcccctggaggacctgttaccactgcgtctcctgctaaccccagtctgggctagccagaatattttccagttgatttttttagagacatagttaagcaaaaaaaaaaaaaaaaaaagacttggaataaaaatgacaacagaaaaaacaaagcaaccccttcatcccccgcccccaacaataattacaacaataaagagtatctgtaacaaacaatgctacaaaaaaaaagagcctccttcctttacgtacactatgccttcactgtttaagtaatgtggtgtgtattacggtgtttaaatttaggtcaggcgtggtgtccacacctataattgtagcactgcgttgacttgaggcgaggaagtaaatttactggtatctaatgctgcctgttctatacatatctatttattaaataaatatctattatttaacagtacatgaaagggaatagttttatttatttaaatagactatattttctactttctaatagtggaaaattatagcctttttaaattcacaaggaacagagatataaattacaagcaaaaaaaagtggtttctaagtaaaatagacgacaattgttttgagcagcagtgttttaatatagtcactgactatttaaattttgtatacttctctgtattctaggtattttgtctttttaaatactaaacgagataattaaaacattactatttctatgtagaaatatgtctgcccactaggatatggaattttattttttaagaaacttaattcctagggttgattcactgtaaatgagtgaagtaaaatttttatttgttcccaataagaatattttcatgcatctgagaaattatgaatagcctgtaacccttggaaatgaaagggataatttctttaatgcatcattaacatagaggtcacaagaaagttatttggacaaatgttttcagagttaaacaaagaaagactgttagggtgggcaagcacctggagacccttgacaaagactttatggcccagtaggtttggctaactgcacctctgttgctttgtttgctagatacaaagtagttttttgtttttgtttttttgtttttttgttttttttagttgatagttgacttgtagcaagttcttcattggtgtccctttttcaaaatttaaaagaaatcaaaattattcatatgtaatttggaactattccgcttaaaacactttagtgaaatatttgcctgtaacccaggtatctgttacttagttgtttcatttgatttcaactccaccctactgtcctttagcctttaactcctggttccatgtatatagtatttttattttattttagtctttagtatctttcaagtaaagatgacattttatgtccataccttatctggattttaaaattggggcattgctcctggtgattccagcttgttaatggttatcaattccggagataaccattatgcgacaaagctgtaaacaaatgcacaagactccagtggacttggcttacggttgagtaccttttatgtttttcaggtttaaggcagcttattgaaattgatgttttcctgcctgtaaatatctggtgatgctcagatttgataattacaatccagaagcacttaagaaagaaaggttgtttttagtttcgtaataacaacactcccgcaaagaagattgatgaatgatgtctttcaagtggcagatttgttatttagttagagaaagctcctctgccagttcctcacaaagctaatttagagtctgtttataaagcaggcaagcctctgcagtgttaatgctatagccctgaagtgcttgcatgtctaccctgagaagactctagcttttcagtggtttaacaaggaagtagattttccaggaatccaaagggattagcatttagcactaattgggggagggtgtagatagaacagagctcaaggctagctgctgtatagtaaaacatccctcagttttctgaatccattttcaatctattcggtccctctgagcatcactgttggggcttgagttcttgtctgtctagatacaagtacatcagtctatacatgtgctcgtttcgacaaggtacactgaggaggtccttaccaaaagaattcttcattagggactacagtaaaagcattcttcattagggattatagtaaaagcattcttcattagggactacagtaatacaaacagcagctcacacagttgggtgaatggaatgatggctcagaggttttactgaacagtgttgttcaaaatcaatccctgttttcctctgtcttcctctccaatggagtgctaactgatcgtggtagtactgcaacacgtacacaggctgccacaagtgtgccatgcattcatttcttggaactgttataacaaagagcaaccacctggatggctcatgcaagagaacttgtttctctcccagttctggaggttgaaattgaaagcaaaacatcatgccaggtcttgctctgggtacctctccaggagggcgtgctgccatgtctcttgcagattatgttaggtttggtcttccttggcatgtggaggcagaacttcagaatgagtctacaccaacacatgatgtctcctcctgctgccccccaccccccactatcccttaccttattcttcctctgtccaaccaaacctttttctcgggtcgtcagtcatttgctgtttgaaatgggtcttactgacccatcctaagttggctacttctgcagagacactatttccaagcaaagtcagggtcaccagtaagggtgagcctagaatttcatttatctctttagaagatacagttcaactcctaaaagtgatagatatggaagtgtaaattcgtactacacaggagaagacagttggaactcattagagtgtcatccaagtgtgagaaactttgctggataggatacgccaagcaaaattacttgaaactctttgtggaaaggcttgtaagcccagactagttttgccatttttagaatcaggaacgtgttagaattaatctgcactgattgattttgattagcatgcatatgttgaaaattatgatgaaatcaacattgatcaacgtttcacacatggggcagatacatttttgttttaatttttaaaagccattctctactttgaaaagttttagaactataaacatatttaattacaatttataatattaacagttgtacttactcttgattaagaatccccgtttgttttttattgcatgataaatgctggcaggctaatttaaataagcaggacttacatcattaaatctgtacacaaagttctttgctttgcagataaaacgaagtaggaagcgtttgtcatgtggctggcagacagttacaggtccacttcctgcctttaacattacaactcaaagcagtgcgctgtgtacaattttaagtctagttatagggaattggttgagagacctcaaatgagagtaaatgactctaaaagtagcttgagtcaaggttgccctgactgtagagccatgtagtaactatgttggaccttgtttctgggaaacagtcagctttgcctttgctgtaggaaggaaacgtgtaaattaattggcaggactatggtccacgaaatcctatttacaaaaactgtgctggggttgagttctgcctgtgggttgtccttggccagctgctggtatagagtactgagcaaggtgctgagcacaaagctattaaaagtgtcaacagagacaagtatatgtgtcacctcgttgtgaaaatatgtggtgaataatgacaccctaatgacagtttttctatgtaattagaagtccatgctttctggctctgtaatttccatccttggagattgagctttgtctttctgttcccctcctgggcggagattttttgatttagctgcattccctccccctccccctgaggctacagaagagagggggaaggaggaagaggacaacataggagcggtccaattatctttcctttcctttcctttcctttcctttcctttcctttcctttcctttcctttcctttcctttcctttcctttcctttccttttctttcctttcctttcctttcctttcttttccttttctaatcttgtgtctaaaaaaccaaagcatgtcctagatttctcccactcaaggttttggtctactgaaaatgtatatttcaacctccattgtagaggaagacagaggagcacagggactgagggaatgtgctgttagctgggaaagtctgttacaacagataagcaggtatgtacatgtgctagctagaaggttattttctggcgtggtttagccttaaggcttcattctttaaaaatatatctccaaggactaccaacttttatgttcatccgcttcattttcatgtacaagcagaaggcaagagaatctttggtcacaaaataggactgactgttagtttctcaactcacagtctatcagctgtgctgagtctttgctccagttcctacaggacagagcaggacctaaggtgtatcttgcaggatctctaatcttcaaggacagagtctgtgatagtgatgacctttgccctgaaaggagactttaaatagcctctctgctgacagtaaatgctccctctgctccaaggcagacatagttacatcttagggtttttgctgtataagtgctcctgggaggacagactcctgcttaaggcggtaagcaaccattggaggattctcagggaacctcagaatgcgttgtcagtgacttctcaggaaccatgactgtgtgaagtttcgggttctgagtgctacgtaaaacattttactagcattattataaaatataatatttatattgtggcacgatttgaagttgttagtaagatcaaaattttggattttgacactataacgtataatgaactctgtatgggtgaaatctcacatgagctttggaaatctctctcaaataatgtgatatcaagatggacaatggaaacttgtatttggggttaatttaagatcaatcctaaggcctcgtgtgtctcaggcaggcacatcactgaactacacttggtcaggtgcaactttttattatgcaccttttcagcatttgttggctctctaggtggaaaatgcagacaaatgattaaatgaatgtaggaagatcggttcatttcatattttgttatctagtctttatagaagagaaagcagttttatttttttaaatatttttattaggtattttcctcatttacatttccaatgctatcccaaaagttccccataccctccccccccactcccctacccacccactcccactttttggccctggcgttcccctgtactggggcatctaaagtttgcaagtccaatgggcctctctttccagtgttggccgactaggccatcttttgatacatatgcagctagccggtagtggtggtgcatgccggtaggatttgctgaaggaggcagaggcaggaggatcacgagttcgaggccagcctgtgctacagttttatattcttttaatcattatataatatgaacctgtgtttcaacccaaataactgacttgctggataaggaagatcaatgttcggtgtattagaagtgaagtgatattgctcatcttcgttatcagtccctgtacagcagagatctgcttcaggctacctagatcccttttcccgctggagggtcagtgttggctggaggtctcaggacaggagctgtgtgtatgtgcgtcctcatgggatggcacttggtttctctgagtctataactgcaggcatgagccaggttgatgtcacatgccttttccagcctttcttaccgaaggactcattggaactatgtgctcacttaaggaccatgaaaattgctcttttctcatcttcatgaaattactgttaataatgcccatcagctggctgttcagagcagtgtgctctgtgtaccaagactgtctctagccattctcacagtcccaaataggcttcttgaaaactatttttccccacctgttttgtagacccctgagtttggggggaatgttgctggacacctaaacttttttattttcattttttatttaatctctgtaagcaaggtatcattttagtttaaggaaatagaagatttacctgagtaacttagcccctcattcctttggtcaccttaatcctcttacgatttaaatggtatgtggaacttccagaattttatcacctgagatctgaatgtctatagatagttacaagaaatgtgtgctgtttctgacctctggcatgactttagagctccctgccagtgaaatcaacctcataaaacttccagggagcattgacttgaatagaatcctgaatgctttcagggctctctgcagtttactgtgcccttgtgctgctcactagaggaagaggggtcccacccagtcatgtcaactaacacttgacaagaagcctgctcccctgcaagccctctgagaatgttccctggcagagatgaattcagacccccttcccctcctcctccacaccagccacatggttctcttcttatgcctttcttttattctccctcttcctttctttcttctcccctctgaagtttctctttcctgcttctgggtgaagcgcctaccctccctcatgctcacctccagggcttcagtgttctctgaccaatctgagcagactgtcttgtgttcctttgacacatgtagcccttatcaaggactgtcatgtgacggtcagccctgtgtcatcacatattgctgtcatgctaagtacctactgctgtcatattaagtggtgataagtggtggcattacaaatattgagaaaagtttaattcagtttttttttctccccttccgatcaaagagaacatcgatggattaaaggaaaatgagaaagcccttgagagtgagcaaggttccaaggaaggaatagccttcaattaatttaaaggcaaaagtcacttctgtgtatttccacatagtattcaaaacagtgttcagacttggcagatacatataatagttgctatttctcccaatttccatattattatttgaaaatcttgatttaatctagataaagagcttctattgcttggaaagaggtaaaaggtaaaatttcacattggaaactagcaaaaagtctaaagtcggtcatttagaacttgtggataaacaatgccaccttcctgagatttggcagccggggccagttccggggccagttattttaaaagaaaggcacgtgggtaaatagattaatatcactgctgtttattgcagagtagtcacaattcagggcgctgtcttaactgtgtgtctatctttagtgaagtaacgtttgtggaaaagttagaggtggttacacacagcgcctctgcctgctcctgcatgccccgtgcgcatgcgcagtgagcattcacagctctcccactcagtggctggctctctgaacccctgcgagctgttttcacttcctttaaattcttatattaacatttccttaaagactttttgtttctgttctgtgctgcgctcatgaccctaaatataccagcttacaacaactggggaatcctccaaatgtgcgctttcgacatgaataacgtggttttgtttggtctgcattattgacaaaggtccttgatcataactcgtggttcgccttgacagaacatggttggtcttccctgctccagatcccccttagagtagcaggcatcgtgttctggaaactatcctgcattgctgttgatagaatttcttgatgtgtaggatatgatgtgagaattccgttagatgttcgggaaagttctcttgtaccttcttagtgtctctttcccctttattccttttaaaaggcattcttggaggcttggctctggcattcttgctaactatgcctaccccctccttttcttctgtataagcaaagtggctttgaggaacatctgagacgttttcaatgtgtaaacagccttttaaagaaatagctgctgtgttctcccatcacaagctgacttgtaacacttgaaagacaaacagaggcctgtgtgttctctgttattgttgcaccccctcacatagctgtctgcgtttgtcagcagtttgttttgactcataatgccagggagggggtggcttggtgtgtttttgtcagttatgcagtgtaggatgtcagttatctcaaagttaccattatgtttggctgctgtccctctatgtaaagaaagcctcagcattggttcctgtttctcaggccagtgttgggttttgaaacttgcccttaaaataaatgccaaactgtttttctcatcttgtaaccctggaggtcagaggctggctctcttgtttcattattgtctcggtgacgtgtttgtggtatttccccagactggtttgagaacctacctgaactgcccttttcaagttcccgttgctcttctagagttggggatcttgtgtattccaacaaggttggaaacactcccaaatcaacatttcattttgaaagcggtactttcagacccagatgactctcctacattaattcgtatggggacatcaacggttgttgtacttgacagaggcagggaccctgggcttgacagggacgccattcttcaagagaaagtgtcccaggtagcctctcctaacattcttcccatttccttagaacactgacgctcccccagttttaggcaaactgtcatctttcccagccaagaccaccaaccttaggaagtagcaggagctttggaggtgaaacacaaaggcaaatgctattgatcttaggccaccaagattctcattggatttgagtcagtacagatgtctgctggctccgatgactgcccgccatgtaaagtgtctggctgccacctctgctgtgtgtatggcttcatcctaacagcaagtgcatacgcgtttactgcagcctgtctcttatgggggattaaaatagccagaaggcctgaatacctagcatttttatctagtatttcagcgatggcgagttcatggggtgaggggtgagactgtgtttgctgtcccgcctctcaagccatgacctttaacgaggggttattttagaaagttcccaattcactgcgggtcactggagcttgggcagaagtggggatgcacggcattttcatagatcacccagcggcttctctacctgagctggaactcatggattgtaaagatttcaagcatttgccctgagtctctgtgtgcctccgagtattatccatttgccaaaggctaagctgtgttcaccacacccctctcttgtcattccttagtgtggtgtggatccagttcacgctcgctgctccagtcctgacagctaactgtgaggcctcttctgaatagtcagtgcctaggatttaagctttattttgtgtttgtgggagcatcctagctgatagtttagacgttgaactccgtcttacacctttgatgtcctactttgttgaggggtgttcaagtcagaaggtttcacagataagatcttggaacccagctgggggtcaggaaagactgcttgtgaggaaatactttggatctaatgttaacactcctgtcggggcatggattggactcaggtagagaagtgtaccacaggagacatttaaggacgtagagaagcactcctaagttggagtcacgtgagaacatgttttgttgggttctgagtgttcgatggctaagcactgtagggaatgggagactgggtgtactgtagggaatgggagactgggtgcactgtagggaatgggagactgggtgcactgtagggaatgggagactgggtgcactgtagggaatgggagactgggtgcactgtagggaatgggagaccgggtgcactgtagggaatgggagaccgggtgcactgtagggaatgggagaccgggtgcactgtagggaatgggagaccaggtgcactgtagggaatggtagactgggtgcactgtagggaatgggagactgggtgcactgtagggaatgggagactgggtgcactgtagggaatgggagactgggtgcactgtagggaatggtagactgggtgcactgtagggaatgggagactgggtgcactgtagggaatggtagactgggtgcactgtagggaatgggagactgggtgcactgtagggaatggtagactgggtgcactgtagggaatgggagactgggtgcactgtagggaatgggagactgggtgcactgtagggaatgggagaccggggctttggatcaggctttccttgtcccttcctccagccttgatcatggtcttgtaagtggcagacgtttgcctcccgcctgcctgtaccttgagctgccctttatctgttctagttagcatgaggttgggtgatactggcttgcatgtttgtatttcacatgtttcaccttatttgatgcactcgtgtgaatcaactttggataaagtttgactggcaaatcttgtgaaggtactttatcgtgccatgaattaactttttattacagcatggagaatatctttgggaaaaaaaatactttaataagagaaaaggttgcttctgcctgtcccagaagctgttagaattgggaacaaaacacccatggccttacagagacaaagtttggagctgagacaaaaggatggaccatctagagactgccatacccaggggtccatcccataatcagcctccaaacacagacaccattgcatacgccagcaagattttgctgaaaggacccagatatggctgtctcttgtgaggctatgctggggcctggcaaacacagaagtggatgctcacagtcagctattggatggaacacagggcccccaatggaggagctagagaaagtacccaaggagcaaaaggggtctgcaaccctataggtggaacaacaatatgaactaactagtaccccggagctcttgactctagctgcatatgtatcagaagatggtctagtcggccatcattgggaagagaggccccttggtcttgcaaactttatatgcctctcagtacaggggaatgccagggccaagaggtgggagtgggtgggtaggggagtgggtgggagggcatgggggacttttgggatggcatttgaaatataaatgaagaaaatacctaattaaaaaaaaaagaaaaggttgatttagctcttggttttggaaagtcatggacattgtctttgaagtcacacagttctagtgaggagcttgtgaatggcaataggggaggcagacattagtctgaattccagtcctgagtagcaacagagagaatggccatcaccagttgtgttcttcttgggaaagtccttcatgacaacttaatggccaccctgtaagctacctcatgctctagtggcctatagttcatccactgtgagccacctctcaagctttcaggttttttcagcccctcccactactgagctctcatcagacagacccttagtggactctcaggccacagggaaagcacaccgtgtggtttcagcgctgtgttggttggggtagacacgtggcctcacattatagctgcaggtgactttagctgtcagtaccacaggggtttatgtcttatttggatgtcctactgtctctttgtccctgaaaatacaaagtcagagactgtacctttttatagactttaccggcaaacatatcagagtctgtttctctcatttcttcattggagaaacacctccgggacgggtgggggaatgtttttaaactagttttcatctcttttgtgatgctttgtaaggcggaaattgtaacagtattaccaacacttcctgtgacaaaaagaaaacagtacaggccttggtagtgctgagttaatggaaagtattatctccaggggagaatagtttccgccaggaaggattgcttcctctaggagacggagtccaaggatcagagcatgtggcctgcaaacagacagccttattaggtaattgtagaggactgtctgggaggtggtccaccgtggttcatggggtcgttaacgttgctgccatagccagtgctgagttcttagggtttcagcagtaggactgcgtggccgagaagggcgatggagattgtcaatcactgcacatattctcttctctccatgcgctttctttttaatatccaatgaattcgatttccctggatcaaagtcccagtgaaaagaaaagcaagtgaatattctcagtagttggacttcctgagtgtataggtaatccaagtaagtccatgtacactgagatagccctttaaatcaaaatggtcacaatgttattgggctgctttgaactggcgttgtagcaatagtaaatgattttatttccttattaattttaatagctagagtttcctttagagtaagggtaatcagaaaatttgatgatgtttggaaaatttgaatactgtctcaggctattataaactcagatactctagactaaacgatgtgacattttaaagcaggtgttaattagctttgagaaggtttcccttttgaaatcatggccatgccaccaatagttagaagactggttaagtccccagcagatagcaatcattacagttggaaggagagacggacagggtggaaccttgtgctaccacgtgttctgcagaatgaggtaagggccgaggactaacgctggccttccttcttgtgacaaaaatgtgggaaagaccatttcacctaaacttcctctaataatgtgtaatttgtcagaagtgacaaaaccacattggaaaagcagcccacatttccaaagtccatattttgggagttgtataaaatcagccttcttaaatatgagtttttgaatcacattagagactatcttagtgtctcttctgcagtttggactccaggaatggaaggtaaatttgatggttactaagttgttcttctttttttgtttgattagttttgttttgttttttgattgtttgttttgtaatattcaggaggacagttacttaagaattgtagtcactggcatacagtagcatttcagatccagacatatgacagagcagtgcccaggaggcttctgttcctgagcggctgaactgttttctcaccctcttgaacaccttctgcctgctgcaataggggacacctgtttcgttcctagaaaatttggtgtgaaacactcctttgacctttctggatgcttggctaaggcatcttgtgactgacgagcctttcttttaaaaggtagtttgtgttcagaactgaaagtcaacttaaacaagcatttcagtcagttacccccaaatgaagatgtggcatgtttgtctcaggatcgagagtgacattaaacctgttagtgtctatttttttctattcaattccatgctaaaaaatatgggactcacatattatttttgttgtttgtttctaaaacttctacctttcacatgacttgatgtttaaatatttcctgtacgtaaaaatgagtgagcttacttcctggctcattcattcaataaattccacgttattttttactgatgagcattacatggcactttctactgccaactataataaaggttggtagttgcttccaaggtcttttttctgcctacccctgttctgtaggaagtattttatacatcctaagtaaagggaatatttcacaggttcagatggacctagtgtggcctgtgtccatgttccccctccattctctctttctgtctctgtctctgtctctctcccgctcccccgcccgtgtgtgtgtgtgtgtgtgtgtgtgtgtgtctgtgtgtctgtgtgtctgtgtgtgtctgtgtgtagatcagaggctagtttgggttgttttatttttttcccaggaaggctctctaatttgtgtcttgagaccaacattgtcaatggaatgtggatccaggtagactaggtgacccgtgagtgccagagatcctcctgtttctttctcctctaactacaagcacacacattcactttgtgctttttacctgggttctgaggtccttaggcttgtctggcaagtactttatggactgaactgtcttcctatcccttaacctcaagacctcaaagagctgaaagggaggtgagggtactggcgttctttttcccatttcctgatccctgctggctcaaatatgaagacgattaactagtatcccggattccttcaggatggcacgaggagtataggcacttaattatcctgtggactctagagggaaaagacatcagtgtcagacattctgtattttgtcacgcactgcgaaatctatgtgctcaaatctctcttcatgttgacggtgtgtgctatttctattacattctttgatgttcaggtttcagattgtataataatatatgaaggcattgtcacatgaaatattaagctttagtaactatacctgacttaaaccataagcaagcattgagttcatgaattttcagcattatatgttgtgatttttattagacagttttatctaatgttaaaccatttgaagactattttcagtcttgatcgatttaatggcccaactgagattaagcagggtggtgtctacccacaatcaagatctcctatcttttcattctctatcttcctgttgctctgcctttctttctgttcctctatgaacctttcctttccccatgtacattgtattggggagtggtaagcgctggtatgctctaagaggctacttcactcatcggacttaatcgaggccaggtgcctggcaatcctcctgaacacacacacacacacacacacacacacacacacacacacacacacgctgatcaaattgagtcagctgcttggggagcttgcgggcttacattataatggatggaaaaatgccctgtgctttgcaaccttttaaactaagtaataacatttacgagaaattgtgaatgttatgggaaccactttccatgtgggagatgactactaagaaaaaaagtttcctaatgatgaatgagagtttttcaaaagcacggtttggtttgtcatcttcagttcaaaaggcaacttacatcatcacactggggaaagagatgtagtagctaaatgtcagggtaggtccccaaattatttggttgtgttttgtgacatcgagagacagtgcccttggtagaatcattgtaaagcacacttgaagttctatgtggaaaaagttgaaagaaggaccagaacattctattggtgccctttccaagctgtgtatttgtggttgtgccaaattctgctacgtcttggatgcagagctgtaagtgcctacagataccagacatctcatatcttagcttggcagtgaacatatgtagtctgcctgatagtggtccagccatattttgtaatttatttcatatatgaaagggaaagtaaaaggaacgtttcctttcctgtggatatggggtaacctgaatatcaaagctcatctcctctgagcttggattggtttaggagtcactgcatttgcgtgtccactcttgctttcctgttcattttcagacatctttagtgtcgtacatctgtgatgtgatattagcaggaatatgttttcactacagattttctttttttctgctctgtcattgttattatcattctatgcagtctgcagtttacctgggagggaccaatggtcagaaactgttagcactgctcgactcagccctccatgcatccattgtgttacctggaatctctaactctagtttgacattcctcaggcacactcccagtcatggtacatccatatttatttatttattttgtccatgaaacccactttagatgtcttgagtgtttttttttttcttccctatgccactcaatgcgttgtctcttaggtctcccaggtttccctcatcttttccctgtttggatccattaatcacaggccatgccagtcttcctagaaatgttctaactgtataatttgggcagtctcctaactcttgagtctccgagtgtccctacttcagagtggggcattatagtaatcaccatagtgaacatgggaggattcggaaggatactgatgcgtgagttgggagagttctgaaataagtgacagttgctcttgtcatcagtatgacaattacttgaaaaaatagaaataagactagtggagaaagttggtgatgaactaacgaaagcttaaaagtatggatttgatattacagaagatgtgtggaaccagcagaggttcctaagccctgaagtgatatcacttaaaagaccttgaagttgtgatttaaatggtttctatagtgatgggaaagatcaatcactaatgtaagaagagctgtattttgtatcgagatgtagtgctgtttccaggtcactgtgtcttatttcgtgttttatctccctcctaactgacattctgtttcaagcttcattattgcatagttttattacttcttaataagtggcttgaagaaatcattttatgtatgtagtgactgttagtgtgttcacttcatggtcaaggagatgaagcaaaattaaagtcgagtcattttaactttccagagtgtttgtgtttgttgtttacttcattgaaaccaggttggtaagaatttacattttgttaagtggattttaactttcaggaatctttatgccctaactctctcaaagacaggattcaggtttaagtgaaacggaatggaaagactagggcctctctgctgctgcagtgcacgatttatatctcgataaaatgaagggtgtgaggtcacctcttatggtgacatcatcctttttatatcagtgttttcctggcttaacaccaggaagtgtaaatcaagagcagatcaaaatgtccactaatgtcaagtcaccaagcgctttggacttttcacgctctgtcaggagaaaggggcttgactctaaaatccgaagcaagcttttagatggccacaagcttctagcttgttcacttgcctcacccccaggttgttagcctttttgtgtatatgtgcatatttgtgggtgtatgtgcatggccatatgaaggtcagaggacagcttgtgggaattacttctctctctccaccatgcattctgggcactcaactccggtcgccaggctagctagcccttactccaagagttttctctgtttacgcatcatacttgagctcctgcatagatattggaggagcaggccagccaaaagggaattggcatgtaccaaactgctctaattggagttagtggtgaggtccaggacggagggcactcctgagcactagggaggtgctgggtttggctctgctggtctaacacttccataaggagtgggaacctctgggtcttgctgtaaggtggaaggtgaagttaccctgtcagtatctagactgaaggggaaagctgaaggatagccctgcctttactgtgctgtctgggtcactgtgtgcgagctgtccatttcttccacatttcacccagagtcacacagttggcatctcgatccgattttaagaaccctttaggagaaaacacatgtcacttggcgtcgactccatgctgggcaccagggaaagtcacacacagacacacagacacacacacacagacacacacagacacacacagacacacacaccacaccacacacacacacacacacacacaaacacactaagactgagagatgagggcagaattcacaaaatgcccaacactacagatttccagagccaaggatatgttcatggtatttaatcctcttaggacacaaatctgtgtgacatttgagcaaggttttaggtacatatttgtgaacttgctcggatggcagactaccattttctcatgcataagcaaaagaggtacttggtatttgaattggcatctctggtatgactccacggatatcataccctccaaggtctttcctacagaaaattgcctttcagagtgaaggttaagcacccagcccttctcgctctttgaatattgatctgagagcctgtgtagggctacaggctccaaggccattgtaagtctggagctgttgggggggggggtggttgcgatgctgaggcccagaagaaacacacccctgggcttcaggctgagactattttcatcaccagcttctcaggaggacagaaagcagattgacagaagctatggccacaagtataacatagtaatggcgctggtgaggggcatggggattccacagtcagaaggatgcaatagcaagggaggtggcgggtagggaacactgtaatgtaggtcccaaagagtagaagattgaaggagcctggtccttttttttttgtattcaggcacgagaatttctgtcctagagttcagaggacccagacacatgggagctccagcataagaggtcagttgcagctgaaaacaaagaggttagctgtaacccaatcagagaaaagcccacctgttccatcacagctgcatggccccatcctactagcagtaggaagagtctacaaggctactgtctagcagtctcaaaataagttgattgatttgaaagtaaatttagttaatcagataatgtgaaatttcccaagtgtcccttaaactgagccccctttcctcaaatttctctcctactgttatagaaatagtttgtgtgtagtgaactgtggtagccacaaatgggaattcagagctacaaagaaacaaaggcctgtcactgcatctggctacctcaccagaagtcgcttaagcggtctgagaggcttctgtggcctgagaggtagagatggcattaggccaggggactgactattttagtggccttcctattctgggtggcttttgtcagtgacaccagtcatagccagaaacagctgtttctgtggagtccagactgccatctatttttagtagaagctgggagaatgtcagaggtgatgtttgagtttctccgcccttttgtgatggtctaagattaggctgtttagaccttctgccctctgtcatttcacttattgaattcaagcacagccttttaatttcagcacacgtaagctctggggccattgaaccggttctataaacaaggacttttctgagccacagataggaatacaagaagtacacagatagcgtgtcagccagcagttggtttgagaggagcaagacttgggaggcgtctctgcactcccctgaaggagcaggtctgctgctttgatttaagaagcccggatgttacagagaacagcaaatgctgagagcttggtgaaagcagctgttcagttctctagacattgctactctgtaagctttcactatgttgtatgttgattaaacaacaggtatatctcagcgaaaatgcaagatagacaagcaaaacacaatagaatatttgggaacaaaggataactgttgactaggaagacattttcattggaggccatattttcccattgtatcaaaagggtccttgttttacctggactctattctaagtaagtttgtttcctttggccctgagtgtgcttcagtgggtatcagcctcccagcttgtaactgattgtgaacattgttttcctttccgttttctaattccaagggaagataaccaagttacactccttccaaatagctctgcttgggtacaggatcttgaccagctagattgggcaagatttagtcaaggctgttaggatgctgcctgtcctgagaagggaatcgtcgtcatagaacagttacgcctgctgaggcacacccttccttgcatgcatctttccttgagcacctttccagtggctacccatttagagatacttaaacaccctgtgtacatcttgtgtacaaagactatatgtttgtagactaatacaaaaagtagaaaacataattatagaagaagtatatactagagtttatatgtgtgaaaaatggaaattgagcaaatgatggcttcatataatgaggcttccttttgttattataatgggctttatgtgttgttctgggactatcatgaggttgttaagcaaaacataaataaagcaaaatccgggagagtgtatttgctggagtaatgctgagatgcccacatgtaagtctgctcatgtttgaactccaaaaaggaggaggaaggcacagttaggatcttggaagtgcgctaatcttgttcttaaattggctccctcttctttggtgttccctaagcctacaaagatacttgaaatgatagaaaagtatttaagaatgaaaggaagaaattgagaatgaatcttgatttgttgttgtttacacttcagtatttggagtcagccatggtcactgtctggacaaccacagtgctctctctagagtgttcttggagtatagcacagctgcagtatgggggctaacacttctgaactgtgatgacctttgctgcacaagttcccaaggatctgcactctgagtgtgaatttttaacagccatttaaagacgtgtgtgtgtgtgtgtgtgtgtgtgtgtgtgtgtgtgtgtgagagagagagagagagatggggaaagtactaactggttaagtcattttctctgatccatgacttttaggaaggtgaatgaataagctttgaattgtttatttgacattgaaaaattatatggatccctaagtctggtgaagcatcaacaaaaaaaagtatatgctcatatatacatatacatatacatatacatatacatatacatatacatatacatatacatatatatatatacaccccacacacataccctcacaatatatatgtgtgtgtatatatgtgaatatatagtatatatacataatatgtgtgtatatatgcatatatagtatatgtgtatatatacatacatacacacacataaatgacttgggaatgttagtggaatcctttgaagtatttttgtgtgaatatattttaggtttttacataaaaactagaccaagaattaaataagttttcttcatcttctgtaactaggaaaatagaaacataacatttttcattttttggcattttcatataaatgattatggaagtattgggtgttatggtatcttgtgataactcataaccatcacttcgtgtctcagctttaagaactttgttaaaatattctttatcaatatatctataaatattcattcaaaaggttaacattttgggagctagggagatggcttattgggtaaatgtgaatgctgtggaagcaaaggaacctaactttagatctctacatagaagccagtattgaggggtggggacagaaagacacagggattccccagggcttggtaactgcttacacaaactgaaatggtggagaatgatagacatcagctgacatcctcctctggtctctgcatgtgttatacagagggatgcacacccacagacacatttacacatatactacacgcacaaatcacacacaacaaacatcaaacacactcatgcatatcacaaacagcagacaaatcacacacaatacatattacacacatcatgtgcacacacaacacacatatcacacatatatcacacacagcatatcacatacacagtgtctcacacaatacaaatatacatatcctatgcacatttcacactgcacacatattacatgtcttaatcacattcacacatatcacatatgcatatatcacacatcacaaatatcacacatatcactcatgccacaaatactacacatatcaaccacaacacattatacatgtcacacacaacagacatatcacatatcccacacacatatcacaaatacagagttcaagttttaattttataaaattaaaattccagtttcttttctaggacaaatcaaaatggagctgcaagtatcataaatagacaataaaagtataaagtcttttgcaacacgtgtattttcatcacatttctgtccagtctcatgtactatgagaactctccctgtattggtttttcttgggttttatgctgtaaaaaattttgttctatactcctagatttttcatttctagtttgcgtgtacttgaacttcacagatattaactatagatgggtttaaaataaatggccattgttgttttcatttttaatgagtggttttctttagtcgccacaggatggagtaggggataccaggggacagacacaggacttagtgacaccacctgcagccatggcagttctgttcttttatgttacatgtttttcctgtgttcaaatgaaacattgctcctgctactttactctatatgcagacaaaacattcatgagcatgaaataaataaataagtcataaagacttaatagaacttcactctaaagataaagatttaatctagaaatatagtcctattactatacaataggaaagagtatgaatgtggctgtgtggctgttgagtacgctatctagtgacactgaaagaaagctctactttgatagattttttttatgtgtgtcattcagtgaaaaatttggtttatagtagatttctgtagatgagagttggaagtttctaggattattgagtcaaataaacacacaccacacacatacacacatacacacaacacacacacacacacacacacacacacaactgaattgttcctgaatgtcttactccttactttcaccccacactggatactaaagaatcggttaatttgattttttttatttgaggagcttcctgccctctattaaagtaatcacaatttggctgtattcagttggttcacaaaactaaatctagccaagtgatccccaacgtgttagacaaccagaagcctgggagtgttagtgtaaatgctgatccagtgcatggatctctgctgtgtaggctaagctgttatgaaatcaagtgagagataacgagagttatcacaaccttttggttttgccagtggtcttgtttattgacttagtcattttctcctatcagaaaagaaaacaaaaacaagcagttgactagcacaggagaacagttgaatctctaaattacaattctgcactctacatttctatgcatactttatagccggctaaagattctgaaatcattggatgagtttaagtagctgaatactttggtcactcaacacctcttacctaaattcacttttctcctctagtacattctatggtactcacctggacaaaaatacttctgttgaaacatcaggagtgtttgcttccataataaataggctagacatatttactgattacagtcattaaatttgatgtttgcattaaacaaaacaaagggaaccaactttcttggggatgtcgatttagctattttgccaggtcatcatcatctggattctagtatgtacatttgttttttattgtgtcatgttttttctcattatcttcaatgatcatagaaacattaaggcacataaaagctttgggtgggaaattttaattttttttccaaacatacttagacttgaggttaccttgattttgtgcaattgttctgccttaacatccaactgagtttttttatgatagtaatagcaatgaaatagtaatgactaattatcccagcagccatcaactcaatcaaaatgtttggttgaatttcacttgaaggcagacttttgagtagtttccagtaccacccgtcacctttcccatcttagtaattctgagcccacaggactgtcgaacgatttgcaggagggtgtctggctgtgtctgtgttctccactgaacagaatgatgcctgatgtaaaggaggagagagcagattgccagaagtggtgcgggcgccaagtggtaatggctctacaggcgtccagcagggatagctgctattcttcgcccagtgcttctgggttagcccacccatgatgtcctagtgctgattccacatgcactgcagcttagcacctgagaggtgaatctttttccacaaaattacacattctctactcttgctccttaaattataaatgcactattgcttttggccctgcggggcataattttctaaatcttgaaaaattaatttctgtctggctacactgaggaataattgacagttaaaacgaatttgcaattttaatttgaactagttttatagtaaggagaaatatgactatttacaaggaaaagaaaaggtggcttttaatgatttttctcaaaatacctatgcttacaaattctgttgtaagggtgctgcagcctgactcagatattgctctctcgggctaggttataacttagattattcagtaaaatttatctgtgtagtgagttttcttttaccccgagtctggaattatcactctttaaagttctttcctctatgaaacaaggctagactgagattcacctcccgagactcatgttggaggttgcctttgatttaatttattttactttcttatgttttgtttgtgtttgtgactatgaagtgagatattttctagactttttttttaaatgaatttgttccagttttcccttttggggaaaatggacttgccgctgtttccttgtttatttagttgccagatttcacctgtctgaaaatgttgttgcaggattttagctttaactgttattggaatattattatctttgatttaatatataagcttttatccttcacatcatccttgaaaatgcattttatcatctcaggttttaaatagatccgagatgtaaaaggcgatgacttttatgtatattttgtagagaaaggaattgacaaactggccatttaggtggtgattaagttggagtaagaaattagggctctgatattaagattttgagtatatttgacattgtcatcagggaacggctctatcttacataacattcatattggaatgggaagagcaaagaagtgtctgccatttgctctgtacgtgtcttgtctcagtttccctgtgttcttactccttgtagggctctgtgacactctcctgtcctcgcaagcagagtcttgctgctctgcatttcctcctatattgaaaactatgaagtatgtctctcagccagctctgtttgtactggctcagaaaactgagttttatcaacttggatctgtctcaaaattgcaaggaaaggcctacttttggagttgctcagcggggctcctctgcaattcaggaaaaagcctaattaaggtttcctgaaactgccttttaatcactgggattaccatgaaaaggaacgtttctaatcacatacatatctgctaatgcttttcttgtggtatctgattactttgataataaaaagtagcaataaagtggagagttaatgggttttaaacatgtggtttctgaaccatataagttgtggaataggtacgcttagtgagtccaatagagttttaaacatagactgtgaagatgtatcacatacagttgatgaatagtcaacctcacccaacggttcctgggaagtggaggctcttgtatgtaacagaaagtagaaagaaattaaaatcgtgttgtgacctggacattggtgagtctcctctgtggcttcaggtgatccttagctcctgattggctcttgttttctgaaggtagtccagctggtgagttacagaacgcctcttcaaatgtgaatcctgggtaccgagagtgaaaattagccactttaaataaatctattccacacaggaataatctcctgtattttaatgataaaattccactgtttattttcacaagggagaaaataaggttgcaggccagggaagctcctagtagtattcgaacatgctgtagtgactgttaagaaattcagttgatgtcgatgaccaagagaacacattctctagtagctactgctttgagttggctccagcgcagggcaattcattagcagctgttgtcagtccatagcagaactctttaacctacttggcagcctccctacatgagcaatgagcttctttgcagagtttgacttttggacttgatgggatattagcttacagttctccaagtcaagtacacagtactaaaggtgttccttctgtttgtgtccaaatgcgcaaatgtcagacttgagcctggctgctttgcgactttactttgttcttgatactgagcgcggactgctggtttcttagagtctcctctcatttatcttaagagtctcttcacttcaggcatcaaaaacacatgtgggttcagtccacatggctgttttgttacttaccattgaattgtgtgtttgggaccttcgaccgtctgaacccttatctgtttgataaagaaattacccaaccaggatttggaaagaaaaccaggaaaaaaataaataaaaaagacagggtggtagtttgctggcccagcctgggatgtgtctgcattcctaaatccctgcctttaagtttatggctataacaaatataaacagcagtgaacaagcacgaagagcttttattacacacacaggagttaaagatgaatctcagatggtggtgaggattacattagtcattcatacacacaaggtctctctatataacccagcctggcttggaactttccggcaatcctgctgcctctcccacctgagcattgggtgctaagattacaggctgtgttgtcatggcctttggcttccctggtattcgtaagcaagtggctacatgtatacacgctttaccgggttgagaaaagtctcccagtgctttcggatgagtagtgagtactccggtgtggcagctagttctcatgctgaccttgcttccagggaagtcagccgactgttgacacggtttttagtagtcatattccatctgtgtcactgagttgggctacattagttatctcccaatgtgccattcaaatgttgtgtcttctgtttacaatttattaaaatataggggagtataagggaatgaaagtgtttaaagacatctttggggtgtgcttgttttctgttctcatcttcccacttctatgtatgtgtgtgtgtatgtgtgtgtgtgtgtatttctaaatacccttctgtgtgttgcccctctgccagtgctgcccatcattgaacgtggcatgtagctatcatgtagtaataagtcctagattagtcagtgtgggcgtgaccctgtcctagtgctggttctttctgcattttcacttcagcaagtggcatagaatggtgcatggagcactcatgacaacgggaatgggaactatgatcactgtctttatccttatggattttgggtaaatggatactcggaaaatgtgtctttcaaatgaagaccacaacatgagtacacatgttggttcttagaggaacatgtcattaattgctaaattttagtaatgatgtaagatttggaggaagaccattaaatattttaacttgatcatattttgttaaatccttaagtatactttttttttttaaaaagaaagacaaaacaaaaccaaccaaacaaacaaacaagcaaaaatcccaaccttttacctggaaaagatgtagtagctctagctggccttttatttttatttatgtgtatgagagtgtgtttgtctgtgaatgtgtgtgtgtgtgtgtgtgtgtgtgtgtgtgtgtgtgtgtgtgtgtgcaggagcctgtggagtcagaagagcgtgcctgataccttggagttggtattacagggttgcacgttacatgtgagctacctgacatgggtgttggtaacctaaccaaactgggtcctctataagagcaatatatcctgttatctgctcagccttgttgtccacaccccatgctgaccttgaactcaaatcattcctgcttcagtctcccacaagctggagctgtaggaaggtgacttcacttcatgtctgctggcagattatcttaattacacacacacacacacacacacacacacacacacacacacacacacacacacacagacacccttatgtgcaagatattttcccaatgaattttttagaaggtcttcatgaaggaggctgataacacttacgtttaaaaacctaatctcgaccaaatagctagaggaccaaaaatggccttcagggagattctataagcagcttccttctgggtgtcatgtgtcctaagtatacagagaaggtgtgcacttgtcggccgcacagtgctagtgtaacagtaagtaccgactgaggtgcgtggagatcctcctcccaggcctcttctccctgcttgtgcctgtgtggcagtggagggacactttgctgaggtggttgctctgagggcggtagctcatctcccccgagctctctaccaggtaggtggccgtgggtgttccagcctgctgcagaggatcaggtttgtacaaaaccacaacagaaagatcctattcttttaagatttaaaaaaaaatctttaaatatatgaataataacacattgaagtgaaaattaaatacctctccttttagtttttaaacacacagcaaattgcaattactaatgaatagacctgtatacttttttttttcaaattcttctagattacaaaagtaggtttggctaaaagaaaaatgagaaaatactgaaagtagtgtcatctgtgatgaaacgtttctctcttgaccgtatgtggttttgtatacaaaacctgtaaagcattactgatagtgcttgttcaacactaacaaggaatatcttttgtagctcagcctcatttggattgctttatactgggaaaagagagagagaaaaaaatcaattttgttttcaaaacattccaagatattggtcagcattttgcatgagctccaagttatcttacatcccttttctgcagttttctcctattaattttcagttcagaattaaccaaactgctttagtgagggttgtggcaactctcatatctgagtggcttttcagccagatgtttggaacagcttagataggggccaagccccggtctagctctgtgacctttaaaaagaatatccgcttcctgacactagataaggatctcccactcaccgcctcttcctctttagagagctcttacagaatcagttcattaaactatgtgaagtgacaaattatgcttttggtttaaagtggtggtcagtgaatatttgagaatagaagtacctttccgtggagaatttggtttcgttgtgctcaggttcctctgcatgctgactgtgtcttttgtttgcttgcttgtttgtttgctattagtagtgtttgctagttcacctttctaccactcagccgtaactccctgccttagttaagctcggtaggttctttcctaagactctgtgttgaccagtgcaggcatagaagtcctttctttagttcaacgcatgctacagtaaactgaaaagaaaaaacaaacaaaacaaacaaacaaaaaacctccccaaacttctgaggtttgagacccagaacaagttttatttggtttgctcttaatttaccaaccatttaactctttatcttctcaagtgcctgctgtgtacagacaactctggggatgttgtaattcctgtcacttgttgcctatcttaaagaatccccttttgttctcatttccccctccctttcttataccttttccccttacgagcattcaccagtgacaattctttgaatataacgtaaggaactggaatggtagaattctggacaaaactgtgggatctcccaggcccagaaggattagttccaacatctgagactgggactttgctgggagatgagtggtctctcaacagtaccatgaatttggcattgtgaagctataatgctgtaaacacagggcttctaatatgtcttagatggggggaataccttagcagtgggttgggtcagatgtcttcaagtgagatgtcagggaaagtatggttatagctttcagtttgtgagaatgaatgttcagaaacacagacttttaaaaattaggccatcgcttgcctcaggtgatgaatgaagttctctgacctgtgctttagaaagatagtcctgaaagaattttgaaaactgtattatagttaatagaatgtagccagagggatgactatagatggctatatgactgcggtttacataaatgaccatggactctgaatcaccagttatgtaacagtacagaggcaaaagacagcaagtgaagaggaggaacagcaaggacgaggagcaggtacagtgagaatgaggtgcaggtgcactgaagaagagggacaggtgcagtgaggatggggagcaggtgcagtgaggatgaggggcaggtgcagtgaggatggggggcaggtgcagtgaggatggggggcaggtgcagtgaggatgaggggcaggtgcagtgaggatggggggcaggtgcagtgaggatggggggcaggtgcagtgaggatgaagaacagatgcagtgaagatgaagaacaggtgcagtgaggatgaggaacaggtgctgtgaagatgaggaacaggtgcagtaaggatagcatgttcagtgataatgaggggcaggtgcagtgaggatgaggagcacatacattgaggctgagcagcatatgcagcgaggctgagcagcatatgcagtgaggctgagcagcatatgcagtgaggctgagtaacaggtacagtgaggatgaagaacaggtgcagtgaggatgaggaacaggtacagtgaggatgaggaacaggtgcactgaggatgaggaacaggtgcagtgaggatgagtaacaggtgcagtgaggatgagaaacaggtacagtgaggatgaagaacaggtgcagtgaggatgaggaacaggtacagtgaggatgaggaacaggtgcagtgaggatgaggaacaggtgcagtgaggatgaggaacaggtacagtgaggatgaggaacaggtgcagtgaggatgaggaacaggtgcagtgaggatgaggaacaggtgcagtgaggatgaggaacaggtgcagtgaggatgagtaacaggtacagtgaggatgaggaacaggtgcagtgaggatgaggaacaggtgcagtgaggatgaggaacaggtgcagtgaggatgaggaacaggtgcagtgaggatggggggcaggtgcagtgaggatgaggaacaggtgcagtgaggatgaggaacaggtgcagtgaggatgaggaacaggtgcagtgaggatgaggaacaggtacagtgaggatgaggaacaggtgcagtgaggatgaggaacaggtgcagtgaggatgaggaacaggtgcagtgaggatgaggaacaggtacagtgaggatgaggaacaggtgcagtgaggatgaggaacaggtgcagtgaggatgaggaacaggtgcagtgaggatgaggaacaggtgtagtgaggatgaggaacagtgcagtgaggatgaggaacatgtgcagtgaggatgaggaataggtgtagtaaggagagcatgtgcagtgaagatgaggagcaggttcagtgaggagagcttgtgcagtgaggatgaggtacatatctttttgagatgattgatgtgagagcacactagacatgggatggccactcactgtaacaaaagccgtaaaggagtctatctgatggattcaaaagccatcaacaggtgattaaagatgagagaggaaaatggaaagaaagcaggagatagttggagctggaagtaggacctcaagagacaaccctgtctagtggatccatattgtgaacagaaaacattttaagtcatctagcagtgattttagaaacattttattaaataatttattttgcataaaatgtctaaattatcttattatattaagagaataattctgttctctgtgtgtgtgtgtgtgtgtgtgtgtgtgtgtgtagtagagcacactgcatggcacaggcatggaggtcagacaacaacttgtaggccttggttttctccttccactgtgattgtgtaatgtgtaggtcctgtggctagaactcgggttttcacgtttgttggcaggtgcctctatcaattgagtcatcctgcccacccagaataatgaattcttaatgaaatagtttatatgtttttaattcatactgtcttaaaatatgctatgtatttgtcctaaccacatttgaagtgcagcgtctcacatgtgtctcatggtaattgtttccacagtttatacttaagccattttcaaaagtcatctactatctatgtaaagtgctgcagctgggtagtttaaatatgcagtcagagtgccatctgagtgctgccagtttcatgggattaagttgtagcttaaagaaagcatacaggcctttggatcaaaagaagaaacacactggtagcattagccaacatgtgctcctgtaatagcatgccttactatttttattaactttttcatgctttaaacatgattaaactgcagtacattttagaggaaatgcaaatttaaaagaatgacattgacagatttgtaactccttcaaggtgtgtaacaatcacaaatccatgttttttccagtgactcttagtcatagtaatcaacctccatattattttaagtttcccctaatgttatatcctacctcattgactgaaattagaatgacagaacagataaatacagctatcacttcacggaactgcagggatcaggagtaaaagtggaccacagctctcttgtgtcccacactgcaagatgggtctgcttccaggtgggtttctggctaagcaccaagggtctgaaggaggtagtccactccaggaaaatcaacgctggctgtccctctggtgtgcttggcactttttagaggagatacacttgataggagagagcagcacggggatgggggagaaatggagccacacagagtaccataggaagaagaatcagtaagggcttgagaaagatccccaggcctcataaatccacagcctctttgcttaagcagcaagcctaaagaactaaatagaggttccataattattctgaagattgtgtattttaaatctcgtgggtaattatcacagctaaaaattacacattacaataatcacaactagcaaattacctggaattgcttgctcagtggatatctttcagcacccgaaatttgtacataaaatgactattcatgagagctatttataatggagtgcttgttagcactggctggtgtaaagactttactgatttctctaattgaatttccatcaacaccgcaggtttcagtgttacctgtctaagtcaaggagttatcttatccttaaataaagctgtgaaagtgtactggtgaaatgaagtagtatatcaaaatatatatgtgtatctgtctgtataggggctggattggatttcttgttaagtgttctttcaaatttgactttacccattaatgaatgatgtatgtccagggtgccggtgctcagtgtcttggctgcttccatgtggctgcatcctgacataccattaatgctgtacctaaagggccagttgcacatcttccgattccctcccacacacagagacatgtgaatgatttttgtgagtagacacctttagatttgaacttggcctgtgctctgagtcccctggactccctgggagactccattgaattcagcatttaggtctggtctttcctttggcccttggcgctctgacttaggtgtcagtcggcagcccagggggagaggccactgttcaacctctcttcaggcagatacttaaaaagtctcctagagatgtatgggatttctctactagaaagatacggcatgagtaattttgctaaggtcaaagatgaatttttgaaattaaaaagccaagggtgggctgttccagctgggtatgacaggatgtgggaagatacccttgtgcccgaagcagcatcactgttcaaagtgccgagagcctgggtgtgaaccttgcagccatgcatgcgggttggggcagggtggggccggggcactggaggtagggccggggcactggaggtagggacaagcagaggaagctcccatcatgtatgacgcccacttaagtggggattcaagtgtctcttgagtatttcaaacttacatcaccttagaggcatgttatgagactctcaaattattaaggtagttcagctattttttgatgactttgcattgttgacttcttgccaaaaatcatattttcacacacatgctcagagcactctccttttctccctccagcatcccttggatctttgagaaccttttctatgctcaggctccaggcgattgtgactagaggtggagtcctggccttggcaccatttctgaggcatgtggttgatcaagcactatatatataaaatctgtgcccacttctgagagcttttaaccagcgtaactctgctgctgtgtgaaacaggttagcgtagaatgtgctcttgagaaaagtgatgatggcaggttagctgaggagtcctaaaggtgggcagtgggaagggcaagcatgctgtgggactccttgctggtccctgtaccatacagaaagcagcacatttcaaaggcatgtggtgatgttgcagaacaattcagagttcttcagaaaatgaaaatggtagactttcaaacctgtcttcatgttaatgcttacttaaaaggcccagtgactaatttgactaactccttgttaaaagatttctcattttaactttggatacaattatactttaatagctgctcacatttaaaatagtttttaatgcattgaaatattaaatatgtgatatgcttttctcattaaaatttctgtctttttatcacttctgtaagtgtggtatttaacacagcgattaactgtggctttaatgccccgtacctatgttttggcagcaattaaagttatagaccatttatctgttcataataattgctgcttccttttaagccattttaccaagtgccgtaaaggttatttttattaataagccaatatttctgcctcaaagaaagggctaatcctttctgaagtttgtcatttaactagcctaagtcatgaatgctttgaaaagtggttctctgtgtatatggacaaaagtttgtcagttaattatttaagaaatgtgttcaacaggtcatgtccaggattttgactttttaaaatcaaattaatttctatgaataaatatttcacctacttgtgtgtatgttcatcacctgtgtgcctggtactgatgtaggtcaaaggagggtgtcaggttcccttgaaatgaattgacaggtaattgggaccagccatgtggggctggaaaccaaacccgtgccctctgaagaacagtaaagtactcttcaccactgaccgagccaacattcccactcgtgattgtatttttaatttgctgatgtagtattttttccttctctctcagtcttcaaaattattatgtaaacttaatgggtcaaaaataattgtttggggcacaaaaaatcattttgaataatttttcttgaatcatttaagtgttgttgcatttatttcctatttgatttgtgtagtagttcactaacttttgctttatctttctttttagttttatttgttttatttttctagacttttaaaatatatttctaggggtactttttaaaaaagtgtgtgctgttttgataaaaacattctaagataaataattttctttctgctgacctggttagtcttgccagtgagtcccacaggaggacacagagaggaagaggagtgtttaaagtcacaccacagcttaggtgccctctgaggctcaggcaaacgggggctaggttgggtcatcttcacagtaagcattggtttcccagccccttgggtggtttgtttgtgctgcccaccttgaggtcccgctgggtgggtgctggagaccctcctgggttgtctgcaaccttggctccatgatgaaattccctgggaagtttaaccgaccttgatccctgaactcttccccaggaggctttgctttagtggtgcagggctttgctgctgtctgaagatctgtaaaatggtttggtgagtctaacacgaaagcaggattcaagactgttgccaccactttttaaaatttttaaccaaatagggaatctgaagctcaaaaggagttagtgacatgtccgcctccagactgacacaatacagactgtaatctttacattgcttaagtgtttgttagtttgttttttaatgaggacatctaagttttttgaaaataaaagtatgtgctctggtgtttctaaggaactctcaaaaatgcctcactgtttggcttagtccaggaaaatgacaagtattatttttttatctgttttaacacaggaaatgaaacatgggcattcatagtaaaacctatagtcttcaccttagatatgaaattcaggaaattaaggaggtagatttagaagagtcatgtgttctatgacctgcccacatcgtctgaaagaatatcaaacaaaggatgaaggcaactgagactctgttaggccaggtcgacatgttagtaattccaaaggagaactgtaatgttcacgttgtgacatgagtcatttgggggacaaagttccatattcctgcggtcagggttactgctttcagcacatatgacatatcagtaacataattgcaaggtagaaactagactggcattttaataatggagttttcagagttatgaaaggggaaatactgagaaaatagtgtagacaaactacatagcccatatatttagaaagaggtgtattgggggtattaagtgagaagaaaggtgcatggtgctttttatttatttctgtctatatttcattactcattaaacacacagatacccaacaacccttgctacagttttgccaggtacctctcagactgcctgtgtatctgcctgtctatctctatttgtctgtctgtctgtctacctatctatctatctatcatgtttaatcagagttgttgtctttcccagactccaatttaccatcccatggacacaggctacgatgaacaattatttgctgaatgcagttactataccttggacctagggcagtggtttgcagagtgtgaagtatagaccagcagaattatcagagatgaagacagctctggggagcttgctggatgaagatattctcagtcccacccaaaagttcagacacacctgtactaaggcggtattctgaagaccgccatgatttctgatgctcatttgcatgagaggatcatcacattttttttcccccatgaaagcctaaaataaagaacaagatggtaaaaagaacatactcatatatgccccaggagcatctacagccaatctcttctctgaggctagtttgttatcgttgtgcgctgggtctaattgcttcaaagagcacttttgttgtcctgactggcttgactacggggattctgtggtctgtgatgcccagctatgggtggatggcattgagtggcttcactccatattcacagcctcagaaggatgtctggagcttccctccacctgtctgttccctcagtaagtttggtttaggacattcacatggttgcaatggactttgtcacagcagagaaggagactcatcaacacagggactttcacgatctctgtttctctctcgtaattgttacttgggctgtttaaaggtgccttgatttaaaggtggagcagtggtctttatctctatataaaagaagcaaaagtaaaattataattaattcatataggcaagagaggagcttgttactactttgtgatttattcaatatatatttgctgatggattacaacttgggatcctttaatgaacagaaatggctttaaggcaaggtgggtagcctttgagaatcataggaagggcatggaggcctctgtgggaagaagtctgacttaccccaccgtccacccacccaccccaccgtccacccacccaccccacacataaacactggcaagtgtctaggggctgtaacatctagctactgctctgcactggggatcagaagtttgcataaactcttgtcactgaaaaggagcactaaagcggagaaagggtcagttctcagtgttgaaagaggaagtcgttcccccacacctaacctcagtcttcaacatctgcttctgactacagacagggggggaggacagacagagttaactctccctttactcagctcttgtcccaaacagtttgatctgtttttattgcggttcgggggtcagatgttcttgttaatacttgggtagctggagaggagaaagttgtagtaattctttatggctttctgagaagttacaatgccacataccaacgttttaaatctgtggatagggtaggatttagtcattcctttatgaaccccaaaggcaataaatgattattaaatccagtgtgcttttgtgttgtttcagagataaatcaaaacaagaaccctgtgaaatggttcattcatttacctagtgcatattttattttgttttaaaattgcagcctacttatctctgtttaagtaataaatgcataagggcagaatccagattgatgtggtatccatgtgatttttaaaaactgcaagtttaggaaaacattaaataggaccttatttctttattcagtataactaaacgtgaaatagtgtttttttttgtttgtttgtttttgtttttgtttttttttgaaaagcaggtgctttgtaatttgaggagatggtgctaatctagctggcctctctgaaagataaaagcctacctgaaaattagaataagcagtagttggcatgggctagctgtgtttgtggcactggaagggagctcagggattaatggcagctgctctcatcctgatacatatgttcaaggaaaacgcccttcgcatcagcttcatgcatacatgagcgtcaattagggatgtctatgcaagagaaatgtgtactgataaaatcagctgttgcccatgtctgaatcacattaaaaattgacatacattacaaggtcaaatcaggtgtacttatgcctatatgttttacatatgcatatcacccatttgtcagcattttcatgggttactgaatttttattgaattggactttataaattagctaattgaacttgtcaaagggaagacgatgaattaagaaaatatcctatagtattcagctagtcaccacaaaactggaagaaaaacaacacaacaagccagctctcttttcagctctaggtggcaagactgctgggaaagtggctggtagggaccttgggtcccagggtatgttcctgagagttcatgaaggcacataatgtctccgcttccttacacaatgaaagagaaaaatggatccgtctgtctcccctctctgagaccttgctgagcattgtttatgagatgctttctttgctgcagcatgtcattggttgcagttggctcacctttgatactatgcagaattctgccacattcggtttctctgtgctgttgatagacattggtcttgggtagtgttatcaatgtgcttgtgtggtttttgtttgtttgttttttgttggttttattttttttgatgaacgcacacatatttatgatggatatccgtctgtctgtctatctatctatctatctatctatctatctatctatctatctatctttctttctttctttctttctatctatctatctatctatctatctatctatctatctatctatctatctatctatctctgagtaagattgctgggctgtggaacatggatgcacatgtatgcattcttgttcaatagaatatacacatattttaaatacatcgtcatatgtgtacatgatgcctgcttctaacaatttgagcacttaaaaaatgagttgtgtctttttaataggctagctcacaagaaagcattttccttttgccaggaaacaatagcagagtaagtgtgacctcagtgcacctggaggctcatccagtccgtgctagtcttcagctgtttagggacattgtgttgaccagtcacagaatttctgagtttacagctgtacgtctatactatgaaaatagaagcaaattacttctgaggttacttctgtctacagctttgaaactaaaagtgtcctgacagaagattgcaaaagaatttgtaaatatctgcaatctctgaaggaatataacttcccagcaaggatttttggatatttgaggtattcagttagcaagtctgacttctggtaagaagttaattaatgtggcactctgttaaaataatgattgttctactaacattgctagaagttttacatcatattcaaaattgatcaaaaacaaaacccacagtaaattcaaatactttggcaacttacaatttaatctccccacaagtgtgtgttttgtgttaaatgcctaatgagttagatgtgtgctttcttacaagtctcactcttcagttctgcacgtgtaccccattgtgaccttttctgacatctaacaggtcggttgccaagttgaaaagtcatgagctgctgtttcatagggaaatagcaaccagttgctagcagggcatacttaatttgggtgtggtggagctgactttgacatttttctttcagctctttctctgaacttgtgtttgtacctaactggattccacgactgtggaagtacaccagagctctgctggacacttgggaacccacccagggcttgcctgtgcccaggactggcactggtggatagaacgggcatcggagagtcttctgtgaggctgaatctctcctcagttaaggcacacattcttcccctgcagcctctagccttgttcttgcagcatgaaagcattctgtagtgacaaagagattataggtcccatgctcacgtgtttgatggagaaataaacaggactcctgtgtcactttcccttatttccattgttgagcatttgagagtcctgtaaataaaagcatctggacccagtggtttatagaagacttcaccagttgctttatattcctagctgtgcttcctgcacggctgactggcggaggcttagttagttttacccttgatttattgctctaagctagctctaccaagaatgtcttcctgcctttcacattctctcttttagctgtaaaatggactggcacctcccttaggatttcttagcagctgatttcaaattctgctactctcttgtctcttttgactcttgtgtgtcccccactccaccataggctacactaacgtctttctcttgattattgtcctccggacaaagtacggtagcagagcttgattgacattttcccaggacatttgttggaaggggtaagcagggacaggggaacttgccaagttccctttattactaagctagaaggaatataatagtgggaacagtcaagtctaggaaagaaagtaggtgtgcatttacaggtgacagttttcatgtatcattgccacatgtcacttgttttccttctttggcaaggctaaggttaggaacagccatactgggtggatcccttgcacttaggcatctgaaatggtaatggaaagtgatggagctgattgagaatttgctccttcctcagaaagctgtaggtgagccacaggaaccccagagcaggaatgcatgccctctgccagtcggagagaagctagacatttcccagtcctttctctgacatcccacaatggtattttatcagaaggttctgaagtatcacccagcagagacttacaggattaaactggggtgtggtgatttggggatcagccatctgatgctggtatttacaaaagtaaaaagtacagactgtcccaggacaaggccttcaagtcctgtggtgagtctctctggcgattgagcaagaggggtgacaaatgaaagttctgtaagccttgcccttgaagtcccaagttgaaactaacacactgtagaacaaccgtgttaccgcccacgggtgatgtgattgggcttctagcctgctggccgtgtcaccaaggggctgatagctgtggagtgaaggagggccaaatgaaacctctcacatatcttcagggtcttagacctgaggctactttatatgcagtcttacaagaagaatgatagaaaatgaaagatttaagtgaaaattgtaaattcttttgacttcctgtctaaccagtgatttttccgatgtcagacttatcgtattaaatccgcgccctgacttagtagctttgaggtggggcctcagactctgcatgtctgtagctctgaactgctggggatattgctggcctgggcacccagtgttgagcagtattgtcagacatttattgaagcaatatccacactgcagtgtttagcgtcccttctttctcccttggtgtacaatggtttctaaatgatgacatatgtcattctctgtggtaagcattagttgtcttattggaagaacactgatgaagctcgaccttggtgaggaaaatttagatgcaacaagcacacttcctgtcctttctggttgcacactagtgcaggcgcatgccagcactacacttccatacaagacaatcaacagccgtctagaaattggagttttgtgctatagagtgacacaagaactgtatataggagacacaaaactcttagtgaaacactacaatactcagctacattctgttttttaaagaacaatctagaccataacttagagagttaggctgggtgtgtacttgagagcttagaagacattccctgcctggagcctctccaagggtacgtgataggctgctcttgtgtgtttgcacttgattgtgttcagccgagtattctattttcagtcatgaagaaaaggatttcttcaccacactagatgtttgtctgttgactcataactggaactgagagaattactgtggtatctgaaatgaagacacatcttttcagaagtatattgggaatggggtggtggtggtgttatctcaggctctttaagatggtgataacaccttgggctgaacgtcttcaaggcagaacacctgctctgtgtgcctctctctgtgtgttactgttttcatctgcttgctttcttggtctgttaactgtagaatgagttctagcagagacacggaggtttgctttgtgttccccctcaaaatccatctacaatctaaaactttagaaagcttcttcaacaaagttggtaggtgtgcataaagatccaagggttccttgtcattaaggtcttagttgtgaaacaatggatggaagtaatttctgcaagtcccttcttagcccctgaccatgcacgcctcactgctggaatcccagtgacatttgcagatgatgctccaagctactgttgggtgagaagatggacaggcctgggtggagagatgactttatttctgttgtgtggtcttcctgctttaccagccttgtcccttcatgcctgtcacttctgctccaaaacctgctgtatcctcagcctcatctactcctgcaagctttttctctttgctgaactgtcagctttcatgtgtcatgttctccctctcttctgccttcctaaccctgtcagaaaggcttcagggcgcagcaggctctccttgacctcctgtagtccagaagcaccctaactgcagcccagtgagtcggagttgtatgttttgctctcccagtagttattagactgtagatcagtcagcagggagactggtagctttcaccctctgtggcagtggtgtagagtagaaacaggctccagcaagttctcaacgaatatctattgaatgaataaagggatccagggtgagtggccttccatgttcatagatcacaatttctaagcatggttcaccagtctgaatgtacagagaactgacatttttctaaggtaagattttagacaaggaagcataagcctgtgttgaggtggggagaatatttattatttattattactattacatttaatatttcctcatagtctagtctctgttcctctcccgttctgccaccctccaacagttcctcatctcattcctcctcgcccatctccaagacgatgtccccacacccccacattcccccacaccccaccaggtctcctcatttcctgggtccccaaatctctcaagggctaggcatgtcttcccttactgaggccagaccaggcagttctccgctgtatatgtgtcaggggcattgggccagctagtgtatgctgcctggttggtggctcagtatctgagagatactgattagttgagactgctggtcttcctatggggtaaacttcctcctcggagtcttccagcctttctctaattcaaccacaggggtcccagtcttcagaccatcgattgggtgcaagtattttcctctcgctcaagtcagctacttgttgggcctctcaaagggctgccatgcttagcttccatctgtaatcacaccacagcatcagtaatagtgtcaggccccggagctgacccctgggataggtccatacttggacccgtcactggacttccttctctccagtctcctctccatttttgtccctgtagttctccaagacagggacaaccctaggtcagagttcctgactttgggatggcaaccccatccctccaattgatgccctgttctttttactggaggtgaacctcacaagttccctcttcccattgttggggaggtgggaggtggggagaccctctagaatgtaccagagacctgggaggtgagagactctcaaggctcaaagggagggagctgggatatgaaactattaactagtgctctgttaaatctgttaagcccttatctctgtgtagtacttggagctttcacccctctcctttagtattaaaatctataagaaatagttaagtatggcatacctacccaagatacacacacacacacacacacacacacacacacacacatatgtgtgtgtgtgtaatatataattggtatatgatcttttcatatttctaagttttaattgaaagattaaagtttttttctcaatatgctgattttcttgtttctgttaaatttttttttttttcattatgatatgagaattttactgatgtgttaaacttatatttctttttttttccattttttattaggtatttcgctcatttacatttgcaatgctataccaaaagtcccccatagccacccaccccctctcccctacccacccactccccttttatggccctggcgttcccctgtactggggcatataaagtttgcgtgtccaatgggcctctctttccagtgatggccaactaggccatcttttgatgcatatgcagctagagtcaagagctccggggtactggttagttcataatgttgttccacctatagggttgcagatccctttagcttctttggtactttctctagctccttcattgggggccatgtgatccatccaatagccgactgtgagcatccacttctatgtttgctaggcccaggcatactctgacaagagacaatttgcaaattcatctggaataacaaaaaacctaggatagcaaaaactcttctcaaggataaaagaacctctggtggaatcaccatgcctgacctaaagctttactacagggcaaatgtgataaaagctgcatggtactggtatagagacagacaagtagaccaatggaatagaattgaagacccagaaatgaacccacacacctatggtcacttgatcttcgacaagggagctaaaaccatccagtggaagaaagacagcattttcaacaattggtgctggcacaactggttgttatcatgtagaagaatgcgaatcgatccatacttatctccttgtactaaggtcaaatctaagtggatcaaggaacttcacataaaaccagagacactgaaacttatagaggagaaagtggggaaaagccttgaagatatgggtacaggggaaaaattcctgaacagaacagcaatggcttgctctgtaagatcgagaattgacaaatgggacctaatgaaactccaaagtttctgcaaggcaaaagacaccgtcaataagacaaaaagaccaccaacagattgggaaaggatctttacctatcctaaatcagataggggactaatatccaacatatataaagaactcaagaaggtggacttcagaaaatcaaataaccccattaaaaaatggggctcagaactgaacaaagaattctcacctgaagaataccgaatggcagagaagcacctgaaaaaatgctcaacatccttaatcatcagggaaatgcaaatcaaaacaaccctgagattccacctcacaccagtcagaatggctaagatcaaaaattcaggtgacagcagatgctggcgtggatgtggagaaagaggaacactcctccattgttggtgggattgcaggcttgtacaaccactctgttaaattttaaatgactatctccagggcagaagtagtgattacttttgctacttaaggtttgaattaaatccagcaagtcttaccatggcaagccatcttcctgaatagtcatctcactaaaattgtctccctgggatagacaggaacgatggtctgtttagcagcattgttagatgtccttttgaaattgttgttgtatagtttgggcacagttgagatctaaaataagtgttctttgaaaagtatgtcgttaatgttggtaagccagggattattaatagtgcttgacttttagactgagaccccttttagactgagcgaatacacctagacaagccaacatctaggctgatgtcttatctaggcttacgtcaaatatggttatgttaatttattgccaggagacacagatttagatggcagctcaattaatggactgttgaaaagtctgggaacattccaatccctgcttcccttttagtcagtgtcaggagctgctctgcctttccccgagtacttgagacttgtagacataagtctgttgtttgtcagggtaagtcagtggcctagcttaaccataggttcacgggtgcttaggaatgctttggaagtgaaaaggtaaaagttgttgacataaggaaaaccagccaaccaaccaaacagtcatacatacatgcatacatgggcctgtgctatttgtagctttagatatccatagggaatcttggagctgtacccctctgcaattagggaagatctttaggccttgtaaattggtagtactgtttgacataagccgactatgagtaactgaaattcacaaccctgaatgcagacaatctgaagaattatgcatgatgacagcatggtaaattatccactatgtgaactatttagaatgtaatgtaagcttatttgtaagttatatgcaatatagacctgactttattcccaagatgtctcactatatacaaacaattttttaatccctccacccccacaattacagaactacaatactctttgtcagaagcctcatgagcaagagatgctatagaaacagtgaaaatctaagacttatactaggtatggttttcccaatgcagtcatagtacactgtttagcaaaccattccaaactcggtggtgtgatttaacctcagttatgcaagttactgtgtgttctggatagttaatcttcacgtcctgctggctggggcgttggttcagctggaagatccactgggaagttatgcataacatgcagtgctgctctgctgctgggggccgatggaaacatctctatacacacttgcttaggcttcctcccaatgaagcccgggagcacgtgcagagatataggtaaaacttggcatctcataagatcccctctcacccatgtcacttctgagcctgaagggtgctaaagcagagcaggccagaaggtgctttagatagaaaggggggaacggtttacaccccgtgatgagaagagtgacagaatcatctttggccatctctaacctctgctgatcttctaagttaagtcctgttacaatgtgtctataaagacttgaggaaaccatggcttacggaggataagacagtgccctgcaccatacagttgctaagtggtttaagcttaatgctagctgtggctttgatgcccgcagagaggttttaatgactgtggtgagctgacagaaaacactacctggatctttccttatattccacagccaatagctgagggtagttttattgacttgaggaattagcccatttcagtcagactggatgacattttttgagaagctatcatgtgctccctctgctgcctctccagatctgaatatttcataattgttgggaaaggttagaggcaaaattctgacattgtcctgtcctgccctcattatatatattagtctatttccttaccaagagcagatatatcctttgaaactggatgttcccagtgggcaccctctgttctgctacagcctacagttttcatgtggtttcaatattctcatgtttactattcattaacatgaaacacagatttttagattgacccttttttcctgttgttcagtggtttttgttgttttgagagcagtcattactcatggatattctttttgttgaaaaaggataaacaaaagaaatgtcagagatgacaacatttgtggagaacaaagtaaaaatgaaggcctctagatgagctaatgacaggttttatgcttacaataacttgagttttctgtatttgattcctggtttcagggcatctgtctttaatccacacatgttggggagaggggagtctgtaaattgaaaatatggcggcagcattctccttgcactttagcacggtttgtaaagttcactcaccttaggggctcttcagggcagacttctctaggtacctcctgatcacaagaaaatgttaaccctcccactgcctgttacggagcctttgaacatgttctacaactgccttactcacacgtgttttggatgagagatgtttcacagaagacccatctctagaatctacagtgaccagcactgtgctgtccccattatatgctggtattcttttaactggctgtgtcctttgagatatcgattccacatattgagggatcggccatacctctcagggcaggagaagttacacctggaaggcccccatggttagaaacctgtgtccattaggttcataacgtttgcagcttttctttcgttgttcagaggagcatcaactcctaagaactggtgggttactgtaggtgttttcctcggtttctttgcccttttatttttcccctggaaaaggaataactggcagagatatccttgcggagttcctgtgtgataatgccgcttgaaactgttttcatatcttccatcttgtaaatggaagaaaagtatggtcagcagcgttgtctgctctcaagtagctgtatctttgttgttaaggtatgccgaaatgcattgtgatgtcctcatttgacaaacttcacaaaactcagaggcctttcaaaagttcctaagagtgtcttggctaactttttagagcctgttatgaaagtaggagataaagctatcaaagcgacttgagaacatattctttctcgaccgtttttagatacgggcttaagtgtctctccgttatactttgtgctttttattttaagagtatggatgtgagaacccttctttggtggtaaggatctaggaaaacatacgtgtaaggtttgggaaaactttggagggaaatggtgagtgcagcccttcccagagattcctctgtcagtgttctcctgagtagtttatggcgagtgtagcagaaaagctttttcatgtgaaagccaaagctggtgttgccagtggggctctacagatggtggagcctgtgctgggactggaaatctatttattcttctacaagcacatttggcccttgcctttaaaaaaaataaaaaaaagagagagatcaatgtaatggcgtttgagtgatgtttttgttccttgttgaaaataagaatatttaaagattataaagaagtagaaaaaccaactgtagtgaatctgcttctcagagatgactgctgtcaatatttttcttgtatcctactattcactgtttatgaattatctatcacagatgaggaaatattaatatagttttttattaatttggcttttgtcatctcgtttttctttcttccattcttccattttctcccagtgttatgattgacgcacatacctggttatgcctaccatgagtaggcctgggtgtggaatggtgaattagtaccatttttggttatcactcatagggcagctgtggttgatacttcagggatggcccaaatctcgtgtctttccattcgtctatgttgcagaatcagtagtggggtgagctggcccttccaacttctgcatgtcctttgtctttcccttgctccattccaggggaacaatgtggagatgagacagcaggctaccgaagggaaaaacttcccgatttccaaatgggaaggaggttctgaggaattgttagtgtgatagggtactggatgcttccccaggaaacaggacagatgtgtttccgctgctgctgtccccgcagactgcatgggagagtggcagctctggtttcaattagcttggtgacattctgctttgccattcatgaagacagaagtcacaatgagaaagcatgagacaacctccgaacttacagagcagtttaacgtttttatgatttagtagagtctaagattgagccctatattattttaattttgctagaacaatttttggtaattttacaaataatgtttatcaaggtttggaagcattatttataaaatttattggtatgtgtctgtttgactgtgtttctctctgtgtgtgtgatcacatataacatttctatctggttttgggaactgttttgagtggtagcaaatctttccttataattttaaaatattttatgatctcttcatagtcaaatgtgtgtgtatgatgtatgtatatatatatcaccaacaaaaacttttgtggtaaaaagtacactgcaatatgtacaatatgcttagaatgtgccttcactacccttcagggaagaccatttaggggtcaggtaaaatggagccttcacagtcagttgatcacaaggagaaaggccagggaaaacatgactcaagcatattttgatatagaaccggtgcagagaagtcaacagaaagaggcacggggagactgtgcctgggggaatgcatagagacttggtggctggcttgggacaaactcagcgagagaaattaggaaaggcagctggccctcgggtcagtagatgttctagaaaatactggaaaattatacagcatatttagttaagtgaaaacaaaagggaaaccatcaaaaccattaaaacaaacaaacaaataaataaaactagtaagctcaagaattttccaagtaaacagaaactaagattttttttctgatgtgtctgtgataaggttttgttatgtcatgaagcaaactatgtattactttttatgtttttaaaattaaactggattagaagcaataaaacatggacatcatataaatagctgctgcactgcagggttgacatttgccttatgcttttaatggtaggttactttgggtcataagtaacagggaggatctagtttattaaaactgtttactttatttttatttgtttgtgtgtgtgtgtctgtgcgcgcgtgcgcgcgagtgtggacacacatgccatgtgtgtagaggtcagtggatgatctgcagttgatcctcctcttctgccatgtgggagcaggggatgaagcttaggttctcaggcttggcctcatccatctctgcccgctgagccttcgctactccacgttcactattctatttcaactgctcttcttctgaagtcaagtttgatttgttttttgatacatgttacccaggtcatgcacctatacttgagtttctagtatttcttttcttttctttttttttttaatgtgccagtgaccgggctatggcagctgccgagaagaaacagcccccatgcataaatcaaaggatttctcttgcccattgtatccactagaaagctgtacctacacaacagcctccagcaaccacattgcttttcctgcaataattaatagtctggtgtatattttaaagatttattacagctgaactctgtcacagatgaggtttttatcaaaagatgcctaatatttaagaaaagaagggttgtttatgttactggggtaagattataaagctattagacaaaataaaggtgggagtcataatataatgctttagtagattgtaatggaaaaatttccccataaaaccatttataggaatcaacaaatataccttgatcatcctgctttggtattactgtgaaggtaatatggccagcattaaagaaacatttaggagctttatggaatatgtaagttaagatttaatatagtccttctctttgtggacagtgctggtgcactcctagaacatttcaaagcctatgagaacaactctgttcaaccccagagccaccacacccagcctaattcttctccctccttgagcccgttgatcacagacagcattccgcacctctctgggaaccttcaattcctttctcagatgattgctctcatggggttctgggtctctcttccttcatttctcctgtattttcatcatctttggagatccccaaacccttttaggtgtagttaactgcctctttgagtcctcggtccttaaaccaagcctggatatgatagacagtcacagagatctgtagagtaaataattgaatgtgtgttcagctgcttgtcaattgttcctgagtatggagtgtgtactacagtcttcctaaagtgtgcacaatactttatggctgttggttgtgtagatgaaatctatattacaaagggaagaaaagcagcccacctcaatgactgtaatttctttattgatcataacttctccttatgactcctctagacctttggctccatacctcacttactcattagaacatctcaaggagcagtcattttaggtaacattccaggatgaggaaactgatttcaaaaggcttagtaacgtaagacttcatagcagagtaaggatatggacccagtaataacagactacatagctaaactctaatgtagggtatttaaatgactaccccacatatttgaatgtgaatgtcttagaaactattctaaggatattagttgtgaacatagcgtaatttcatatttgagtgttaaggatgtgatggtaaattgtccatttgtaattcacccatctgtttttctcatgggctgaatctttatttttatcggctttgcccgaatggaagcttgtatatagcagatgcaagaagaagatatgtagggataaaagaatgcttactatggtctctgctttgggctacaaatttgagcttggcttttgttctagcagtcttctgggttgagttaatatttaatttctttttaaaatttataatcaactttcatatttaatttgttaacattttaattagcccacaaacgaatgaaatttatcatagcatttttctacttatcgctatactttctttttattcccactctcctctgtatcttcctcccccctttttgctggctttctttctctccccaagttaaccatcactctacagtttactgggaagctagctgatacaggtacattgcagagggcctctgctccagtctctttctggccctcctcctgacttgtctgtggcttgaagtaaatactgagtcttcagtagtaaatcgttgctgagctcttccacttctttcttctgatgtttcacttccatattggacttttaaggggaatcttctttgttagtccccttagaggtatggcaggtctcagtatttggacagagtcgcggagtaataatcagtctttaagactgtcagcctcttcctaataatagactgactgttttcagatgggagaaatgaaaggcaaggtttccaccagccaagtctcctcactcccctaggaatcagagtgccccaggtcaacagcaatccagagcactctatgtcacaaatacaatagaaatggttcttagctggatgtgagtttccttttaagtgcctctgcttatatatgtcatgtggttctttggttttatgttagattgtttacgtaaagagctagatacacatgctctagctttcaagtgtgagaaatgaattattaatagttttggataaaatacctgccctgtcttctacccaaagcagaacattctcatgaagtttggacttcactaaataaatatcttttaatatttttgattaattcagtatttctgcctttttatttcctcctccatttgtgacagctgtttcttcaatgtaggaaaccagcatcgtgcaatctcattagatacatgttttgtgcacctctcatatttagtggatgccaccaatgaaaatttgaggttattaattcgcttttcaacatttactcatgacgtcatagtggccataattaaagtggaccagaacacggtgaagtgtcatgaattattgtaatgcttttttcatgctaaagtttttttgtaccaaagttcactaaaagtagtcttatatattcctgtatcaaactatttattctttgtcctttatgatgttggctagaacaagctaaactacttagatttatcataatcagtgaagtgccttcagtttaagtcatttattcattcttgtacaaccacattccacaaccttgcttgattgtcaaagaaattgattcacaccattgacagaagatacagggttataaactgaagctaaaacagaagagtgtcggggcatcatcggtgatggccttgacatgtggatgaattatagttataagattgttgagtcttggttagcacaatttttttttttttttggttgtggttggaaggagacttttagtgatacaaactagtaattagtaatcatgaaagtccttgttaattagtcatcatttcctatcatatggtggcaagtcagacggctttcagaagggctgtctcactgtggaatgattgtatgataggaacaagtaccccagctgcagacaacgtgttctgtgaggctttctgtcttcctttgtacttaaacggtgagaaataatgcaattttgtattttgaaggttgagtgttgttaaaagcagtgtgtctagaatacagagtttgttagagaattatataaagcatgtacttcatagaaaagtacagatatgtcacagtctttattgtgacattaaatttataagataatagatacataattcactatcttaacatgaactataaccttcataagtcagtgtcgttggcaatgatattccaagaattcacatatatgtgtggtgtgtactagggtgtgtgtttaaatatattatgtcagaattctaaattctggcctatatgaaaattaaaataacatgatatcaatgactccaaatagttttaataatatgaattggggtttctttaaaaaatacatgtcaagtgggaggtgagagactccctggactcataggggaggaacctttgatgagttgccagacagtggggagagggaacatgtggagcccacttccagtgggaagacgggatatttgtggggttgccatcccacagtcacacctctcacccataattgttcctgtctgaaagaattacagggatggaaatggagaggagcctgaggaaaagaagatccagtgacaggcccaaagtgggatccagctcaaggggaggtcccagggcctgacactattactgaggctatggaatgctgacaaaaagggacctatcatgactgccctccaagggacccaacaagcagctgaaagagtcagatgcagatatttgcacccaaccaatggacagaagctgctgacccctgttgttgagttaggcaagactgaaagaagctgaggagaagggcgattctgtaggaggaccagcagtcttggttaatctagacaaccactttcaaacactggatcaccaaacagacagcatataccagcaaatatgcggcccctaacacacatagagtagaggacttccaggtctgtgttcattcagagatgaaccacctaaccctcaagagactggagtccccagggagtttagaggtcaggtggggtggagagtgggggcatccacgtggagatggggtggggtggggaggaggtctgggatgtggagcagccagagagtggatagggaggggcggggaatggaatatggagtataaaaaatgaattataaataaaataaaattaaaaaattacaggtcaaatatatatatatttgtcaggctgctttgcatggcctgaggtcatccatttgaaggtaaaagaactgtacacacaaagaaagagccactggatatacatacatatatatgtgtattagtgactcttagagcctctagattataaatttaaaaactcttgttatttctgttttaaagttgaatgtctactaagtcagttgtccgtgggcaagctgaatctctccatctttcatctcctggggctcagagagccgagattactggtaatcactgactttatgcttcagacgtatacgtcgcaaggcaaaatgagaaacatttggatatgcttagagaacaaagacacaaggggatggaggcaagcagtttagaaaataaggaacagttggctaatcttaattataaccatattcatttttttttctttcttatgtgtcaattggaagtttgttcgaaaactaaccctcttacctgataatgggacttaattcattgcaggttttctgcggtgactttatgttttgtctaagcataaatcctgaagcgcttctacagttgagggaacccacactttgttgcttggatggagaacagtttgctatcatttttatctggatgggacagccaggtcaatcttaacgattcagctcagtggcagattcgtgcttggatcaggttgtgccgagcatcaacgcagatgtatttcagagaatgaagatttatctgtgtacactgacagtaaagctgcagattggtaacttctgactccttagagatgaaattgcgttgattaagtatgttaggagactactggatattttccttaaattgaaagatattctgacaacacatttatccttgattgctttctctttacttttactctcctgtttcttgagtatcttggctcccccccccttcatcttatctttttttgtatttttttattagatattttctttatttacatttcaaatgctatcccaaaagtcccctctaccctcccctcaccctgctcccctaccctcccactcccacttcttggccctgtcattcccctgtactgaggcatataaagtttgcaagaccaatgggcctctcttcccagtgatggccgactaggccatcttctgatacatatgcagctagagacacgagctctgggggtactggttagttcatattgttgttccacctatagggttgcagaccccttcagctccttgggtactttctctagctcctccattgggggccctgtgttccatccaatagatgaccgtgagcatacacttctgtatttgcagctacttatttttaaacatgttttaagaagactaggatcttcgtctttaatcacagatacatagtacaccatgtcttctaagcatcttttccctactgtcattaagtatagatacgggagaaaaaaaatggttaaagcaacacgaattttagtggcaaagacattgctaaaatagaaagttttatatatagcaaattaaattgctctatatttcctgtgtattttcttgaggcagttgctcttaccctagtccccaacacacatatgcacacaaaatggcttaagcctcaaaacagtaagtgtgtgtatgtggtggtggtggtggtggggtgagtttgggttggtgattgtgagtttaaaaaaagtggtaaagtcaattcaaagttaaaacttagattcctttttttttttttttagcattctgtgtttcctttgcttcgtcattatctagcactagtttattctacaacatagtttatgctgtatacttcagaactagtaagaactattactggtgacagtgtgacttgtgccccgtgaagcacacatccccagagcatccggattagaatatgggtgcctgctgttccttcctaccttaagcagctctcaccctcttgtcactttatccctctgagacttttcgttcaattcctgttggctctccttcccatatagcagtctgcctaatgagggacacaagttagaatgtcccaggaaagtttggaagtgcttgcttgcaaaccccatcattagggcatttagtttgtagctagaagaggtcagtgaacttgggaagacctcgtctcactgattggctctctcttcatgtcaagtccaaactaaatgttttttcaccctatttcccatcacatcttctttccctctgctgtgcttcagtgacccaaagtgagaagctttgcttctaatactttctgggccctttctgctcctccccagcctcttctttccactttgggacactcgtgtgccatgcaattacatgactttctcaactctcctcttttgtcaaaatttcccttgcttttccggatagaagtagcactgtgtcttggcatttatgtctgattatgcttcccatgggtttctctttctcattaaacagtgagcttaatgaatgaaattctgtgattttccttgctcatgtttctgttaaataatcacacggataaaggagaaaataagagctgttaagaatgtatgtgaacagtgaacattaatttagatggaatctcagagtggcattaacccgtttttaggctcatgaatgtctactaagactcaagtgtatatatgctgaattttttaaaaatatagattcccattaaagattccatgcatatatttacttccctttctcttttctcttgtacttgacagacggaatctcacaaagctgtcccttatcttcagtcacatgctggcagaaatcaaggcgatctttcccaatggccagttccagggagataacttccggatcaccaaagcagatgctgctgagttctggaggaagttttttggagacaagtaagtagaaattgctttcatagtctgcatccatctttccagagtcacctaattgagtgtatagagaacgtacttggtaatttttataagatttgatggggtttttgttttgttttgttttgttttgtttgttgaaaaaggacatttttcctacttaagtgttttaccactgagctatgcctcaaaccttgaaatgtatttagaataatggctcctggtatagccaacaaaactatttgttaataatggaacatataaattatgttgttagagtacatgtcagattagacagaatttatattctgagagaatttattgagtcatttagctccaagaagcagagacacataaaataatttctgtatgtaatttcttatcacttaatactcatctaggatatatatatatatatatatatatatatatatatatatatatatatacacacacacacatatatataattgaaaggtatagggaaatatttactttaatgagcataaataagaccgtggagataattcagtggtaagagcttgctgtgctagtagggacccagagcttgatctcctagtatccacataactgttggtgtgcatggcggctcactgtaacaccagcacactgcagctcacaaatggcattcctgaagtaagctgtcaagctagactaactgaggtggtgagcccagggtgctatgaaagatcttcctcacataaggtgaagggagagcaagtgggtaagacacactctgtctacctcagccttcctcaggtatacatccacacatgcatccataggtaccaaaggagcgtgttgagcttagagaacttaaaaacgtatcaaagcaaaactgaggtgtaagaagtcccctagatcactcagttaaacctgtgtgtattgtcccaaaccccactctgtttaaagaaaggctacctgccagtgtcatcaggaagctgccaagcgaagactagaagaagatgtttcttttttcttttttaatatttttactaggtattttcctcatttacattttcaatgctatcctaaaagtcccccataccttcccccaatcccctaaccacccactcccactatttggccctggcgttcccctgtactggggcatataaagtttgcaagtccaatgggcctctctttccagtgatggccgactaggccatcttttgatacatatgcagctagagtcaagagctctggggtactggttagttcataatgttgttccacctatagggttatagatccctttagctccttgggtactttctctagctcctccattgggggccctgtgatccatccaatagctgactgtgagcatccacttctgtgtttgctaggccccagcatagtctcacaagagagagctctttctaggtcctttcagcaaaatcttgctagtgtgtgcaatggtgtcagcgtttggaagctgattatgggatggattcccagatatggcacgctctagatggtccatcctttcgtcacagctccacactttgtctctgtaactccttctatgggtgttttgttcccaattctaagaaggggcaaatgtttctaatgagcacttcttactcagatacagatggccatgagcagggtgtgtgttggggcatgatagtctgaatccatcacaatttatttaacatttggaaaactttgtgcaatgtggcccaggtgtcaacaaaggaggcatatgcttcttcagtgacgtcataggttccctttacaaagagcgccttgggatgctctctgtagagtatgctgcccagtagggaggaagactggtggcttcctcatggagaaaatggggttaatgcctctgtctgccacataaattgtaaagtcagacatgtaaagtgtgggctgagctttgagctgctcagtgctctcagattagtgagtgaagcatcgctttaatctgtgtcttttcctttctatcatgaaatgcttggtttatatagcttctaccccaactagaatataaatagagcaatgtttttaattggcatacaatatttgggtgccagaactacattttggcttgctgtttgagaagcggtttgctacgtagcttaggctagcctgaaatttaaggttattctcaggctgccgcccacgtgccaggatcactgttgccaggatccactccttgtttggcttgaaatgaatattaaatcctatttttcacttccaatattaaaatggactttttgaaatgaaagggaacaataccattttattccagtagtatgaacattctgggttctagaaatccagctattcataacatttctatatccaattaaagtgaaggattaatagtttcatcctcatctggtaatgggaactacagaagcagagagtatactcatgaaatatgtatgagtctgcaaagcagagaggcagattccggaagactgccagcctcctgtattaacactgagaacccagagcatccatggtgactttcaaaatcacgtttctctctgaaaatgtatagaacaggttgttcacagaaattcattttgaaaactgaaaactacgttttgttataaagtgctttgttagcaggttcttaagaaacgacagctttgctcaattgtttttagaattatatttactttgttaaatatcacagcacagtgaattatgaatttttgacactttgggttttctctgcttagctacagacaacaagggcctgttattgtatagaactgttatgtcaggaagtcacttaacctacaggtcaagtactccccctacctcctcagccctcccaccgcttgctgagtctacagactgaggaaggctgtaaattgcctttaacgttttgttacttttaggatgaacattcagttccaggctactgccagaatgtatacagaaatgtataactagagttctaaaatgagcaacacctttgggagatgtttggagaagcgctcttcactgttggtttttctgtcgtccctgtgctttttgacttcgtgaacagtgctgactagtctaccttcccactggttgagttctttctctttcttctgccccaaattcttcagacttacttgattctcatcttaaagaattcctgttgcttatccccgataatgatgataagtgaaaacgattttatttaatctaccggtgactttaaacttcagaatagtattgttttcaaaaacagacccataggaggttgtctctacaaacagtcagattatcattttataaattgttttgtttgctgcttaatgactgttattgtgacttacttccctgaagggatagtcatttctaacaaagcatttagaatgaattaaaatagaaaacaaaccattgttcataagatgttatgatactcataaatataatttcaggtcagcccttatgaaagcagggaatagaaaaccagctttcaaaccagagccctgttctctgcctgcgtagcagccattagccccatctgctgagagccttgggaacacagaatgcccatgacaaggggaatagaagagcctgcctgtgccagattattaggggactccatttactatttcaaaagttcagtcttatctttacttcctattattctatccaccaggagataatagcaatatgtagtaaaagagcattattgaagaaatctgtcaaagtaagttgtacaaatcttcaaattttgtaataatgtttataatccagaaaagaaagtaccgttaatccagaaacattttcagtctggcacatttcctaactcacacaagtatataattgcctaagaaacagggcaggagggtaagtaaggcaggggagaggaggtggaagggaatcgagggatgggtggaggaggacaagtgggagggttgggaagagggatgaaggggctaccatgcccacactctagaagttctttttctaagcaggaccagtaacaattggaattgcagggatggttttcaagcaaattattattcaatgaaagctgatgggctatttaattctcatggctgtcttcttctaattcatccattaccagttttattcttttttgttggttattttatttattttcatttcaaatgttattcccccttcctgttttcttctccacaacatcccctattgcatcctccttccccctgcctctatgagggtactaccccacccacccacccacccactcctgcctcattcccctaatgtggggcatcaagtctccacaggacgaagggcctcccttcctaaggacgcagataaggcaaccttctgctgcatatgcagctggagccatgggtccctctgtgtgtgctctttggttggtggtttattccctgggacctctcaggggtctggttggttgatgcaaatccctttagcttctttagtccttcccctgactcctccattggggtccctgtactcagtctgatgattggctgaggtcagttttactcttcaagttgaagtttagacactccccggcttgctgtaacagcctttatactggagcctctgtcttcaatcacagcttctgagatcagtgcaacctgtggaaagcagaagctgtccatcattctagacttctggcagaactgctttcagggatattggctctgagatcatgtcaagcctttggccttaagaaaggttgatctctctctctctctctctctctctctctctctctctctctctctctctctctctctctctctctctctctctctctctgcttcaccctcctccaaaaggccacacccaggtcatctatattccagtgtttccccttgctctcttctgtcttcacgcttcagtctgttacctttccttccactacctgggtgtctcatcattgtgccctgccactttggagggtccctgacagactgtctgaagtgctcatccacattcttattgagccaaacacccaggttcccatccattcttctagcttacatggtactgtgatatgttcctgtttcccagctgaggaatttccaagagacaggacagtctatttgaagacagggactgtctcatttagctttgtttttgtgggcctggcgtatgtcttagaatgtatgggcactagtatttattcacaatctgcatgcatagttggatggacagtgtctgttcttggttctgtttgtaatgactccatcattgtttctctgtcttttcttttttttctttttttcttttctttttttttcttttcttttctttctttctttctttctttttttttttttttttttgttgtctcttttcattctatagtttttatacatttctacaactttgccccagaagtttactttctggttacttctcagtcacttaccagcttccacacaattaactacctgactctctgtactcttgctaatatttctgagtgcacatagttgagtatgattttacatgggcttgtcctgcactgttaatttttttacagttatgtcaaattctgtgatgtttctttttggaatgctagttctgttttcattgtcttctgtaaaatgcttctccactttgttttatgtatatgtgtaatttgcctgaagttatatctgtgctttatatacatgtattacctgccggggccagaaaaaggcattggatcccctgtgactggagtcacaatcgattgtgtggggtcctaggaatcaaatctgggtcctctgcaagagtagccagtgctcttaaacattcaggtttctgtccaagtccatttccaatacaatctttacacttttttccaagtggttttcgtgctaaggtagcctataggactatgcactatagagacaccctgttgttcttgagcacacacgtgagtatatgagaccactttcctactctaggttctcttccttggctgacactccggtaacttctgttcgtgggactcttccagaggcattagcacttgtagcttctcatctttgctccaattagccctatcccttaaagatagtacttttgctcagactatggaactatcctcatagcagtgagactatggaacctgaagaggtcatctcctgtagccaggcaatggccctagtggagtgatagagacaacaacccacccagaaaactttcaatggaaaaaatctatcctgtctacaagaaaggcagggctaaagatggagcagaaattgagggaatgacctacacgggtaggtgctgattattcctaattggttcttgattgtgtcaataaagaaggctagagctaattgcttggtgaagggtaaaggtgggacttctgggtcccagaaggaatagaagagatgcagggaaggaagttgcttttggcagctatacattagaaggagcagaaagccagtcatgtaaggccttagtgcacttagggcctgcagcctctgcagcaggtgggggccaaggagttgtgtgggagctagctgttagctgataacattggcaaaggatagtctttgcccagcaattgtgttatctggtaagttttatattaaaaaaaaaagatactgtaatctcaggaataaaattctcttgaatctcttcaagttcttccatctcaggacccaaccctcccctaaatgttacaatcaggtccactgattttgaataagcccttcctggcctcctgcatttactatttttaatattttatttaaaatcgtttggataattatcatcttctcagtccgtgtctaagctttatgaactggggttcactgctttgtgtctgtgcatttcagcagagtgtgtgctgtgtgctttcatgaacattggatttcatctcagaaggataggggaagaagaggtgcagggcctcttagtccacacacaatagagatggagacacagctcctacctgggatgggaggaaactagactggccctgaggccctgccgcactcgcccttcactgcagcctctcctcactctgtcactgggcacactccttggcctgccagtggatccctgtccttttgtctaaagtgtgtgcctgtgagacggtgatataatctcttgtctggtgttgctgtggaaattcaacacgataaaagctgcctataaagagggaaatagtgtctggctcataatgggccaactgtattgtgaagtaattacgtagtttgggtctttgatcttactccaaatatcatctatgtatttgctcattctagaattaatacagttaatctttgactttgatggaacttccacacctggcaatggaaggcaaaccaaaaggaattaaaaataaaacttgagttgtcccaagatcatgtctatccctatataaaagtgagttaaaggtccatgattttgctgaccccggggaaaatggcctttttagagctcagttattgcttctgcctttgatttcccgagcaagtgctgtagactctctttggtttcttgtgttcactgttcacttttaataagaaacaaggaaaattatgtcttttcctctccattgagtaagatatatgttctaggctgttaattagttctttttctccattatggaaaagacaatctaattctctctaattaatagagagagtgcacagttgaaactgagtatacttatagtgaaactggacagcaggttcactagaaaaaaataactaagaaatgaaataagctcaaaaataatttcttttgaaccagctcccaattttgtctgtttaagcaaattatagtattttatctcaataaaataatgtagcttaaatagaaattgaaattttttgctagtgttggactcattatctaaaatgcaaaagtacaaaattgtgacatactaattataagcattcttttcagattgggaatgacagaaaataaaaaggtgataaatgcttaaagttctcatttgacgttaggaagtgcctactgaaaaccggaattgtatgcttcattactgacttattaccaaggactttttcagcacaggatattactcaattcatctttatcctatattcatgtttatataaattatctatctccattactatactaatgtatgtattcacaatatgcaaaacacacataaagtgatacattatactataacattttaaaactatatacagggggctggagtgatggctcagaggttaacaggtgtagctgtccttccagaggtcctaagttcaattcctagcaactgcatggtggttcataaccacatataatgaaatctggtgccttctggctgcaggcatacatgcagacagacactgcatataaaacaataagtcacacacacacaatgtaagaataatgttgatatttgcttcacatcctggcaagcatgtgtgcatacctctagtatctaagactaccacctccacatgcacttcatttaaatacagaaaatggtaaggtccatataacttctttgtacatgcccactcaatattttgttcatctccactcctttaacctctctttgtttcccacctctctcctgctaccctttctatcctcaactctcacctctgctttcataatgcacctcacacacactcactctcatacacacagacactttcattctctctctctctctctctctctctctctctctctctctctctcactcacacacacacacacacacactcactttaaaaaataaaatataaggcgagaagtagaaacaaggtggagtaggggctggtgggagaagtgtgtgatgtggaccatggtaaaagctacagtaatgggccctgctcctttgtgagacaaaggtgagtgcaaagggttgcaactgagctgccttctgtcatttatctagctttgccttccctccttccttgacctctcctcccctccctttctttcccatcctccctccttatctccctccatgtgtcttcccctccctcactctcagccccatcttccctccctttctctgcctccacacttcctcccctccccactcttagtcccaacttcccttcctctctctctctgcctccaaacattcccctccccctctcagtcccagattccctccctgtctccctgcctcctgtatccccctccacctttccctcatttttgtgtatgcactgctcaatgagaaaactgcataaatgacatcctggaggtcattaatgttttctgaatgagttctcaatattatgataatcactaaaactcaaaatggtgtctctaaactgtttttgaagtatagtttagaaaaatccttgtgtaacctctgtttaaaacaaaaacccaaaagagaatgagaaattatgtaattaaattttactttgaaaaaatttaaataacccaaatcactccttcctgtaaaaccccaaaatccataattttcttttccataattcttgcctactaattagtttggagttaattcaataaagaacgtgtttaagattgtgcatcctcattctcagaaattcttgtatgtttttactttttgaaccattaatcttaacaaagcttgaatgctaatatttttaaagggttttctataatagtttataatctcattgtaatattaaacatatttcaaaacatttggaataaattacaacgtacttaaaaagagacctcatataatattcttccaagacaagctgtttctctttgaagcagagatccagtctgttgagccctgagaacctttgtactgttctccctctgtcctggatgtctcttccctggctgcaggactggagagagaaagtctgggaagctggagattggaagggtaggttgcacaggcggcattctaccccacacccccagagatgattagattggtgtgtttattgcccattggaaaagatctgggttcgttaagtgccaggttctgtatcactgacaatcacacagtgcatgtggagccactgggcatcttcatagagagaatacaggctcagggaacacagggaagacatgggtgatgctctcaccactgtcttgctgtgaataatacacatctttttttgctaacccatgaaactgaaaactaattttctagaagcttggaagctgtgtatgtaccccacactccacaacaccctagaatcactttctgctggcaggcaaactaattgacttaatagcaaagtaattctttttttttcccctacagtcaacatatagaaatgtgttactgactgctaaatattcattactgactgctgaatattcattttgtattttgaatgttgattctcactgtgaagaacagtaatggatttccctgcttagttccagttctgctcttactcttcagtaataatgtagtgtttctacagaacattaagcatgacctgtgcgtccagctactggagagagtgaggcaggaggattccaaaatgaaggtgtgactgggctacacagacagttcatgtccagtcttcggtacttagtgagaccttctctgaaaatacagagtaaaaacaatgttgaggacatagctcatggtgtgaatggccctgggttgatagagagggagggaagagggagggagtattgggggggagagctcagtgatttctgactgtagtagaaggacattttgctagacctaaatatgtgcagtttctccagtcaggggcttagaatattgctggatgcttatttcctttggttttagactcagatgtctaagaggcttcactcactcttatctgacttaattgggcaatattaagagattcaagaggaattttgtttttattactggcagagtgggtgtgtgttgtgtgtgtgcacacgtgcacttgcatgcatgtgtttgtaacaatgaggtcttatttttgaaaggaagatcattttcaaacaaacttctgtggtatgatttcccatttttcatgtgcacattatttcaattttaagtaatctgattgtagcctatcaaaggcagcttgctttaaacatcaacagttgcatcccaggcaccttccagatgttaatgaactttctgagaaaaggcaatgaagactagctgtactttaggaagatgtgagtaaatactcaacactttaagaccagagtctgctcttctatggttcatgactatgacatggaaaaacgacaacaggaattttaattcaattttatatgtgatgtatttgcagcttctctgcctagtcctttctaccagtaaaccatatttccaaagtgaaagagtaagcataagcattgcagtggtgactggggattcccttagttagttgttactctcctgtttaataaaaaacagttaagaaactggacttggaagcatggtgaccattttcttagagcttgagagaaaaccagtagggcaggcaagctggaaatctcagtatgtgccaggaggagataactgtggactaggaaggcaaagacccatgccttcaccctcagggtccaagaagattgcggtgcagatatggaggtcagcaggcagtctatggcagaatgcaatggggcaagtgcatcccagagagaataaaagctatccatcaggtcatgttgcgctcaccttgtccagcaagaaaaacgcaacacggttggattcttctcaacagccttctttatttcaggaacacctctatgctatgggaaccccggaaacccagggaggactgcttatatacaccccagcactgggaagagctatgtgtcctcccgggattggtcagtctgctggcactttaatttctatgcgcccgctcgggaggggttggcgccagattcgggccagcgcctgcgcagtggcgttgtttacagtgatggtgtactggaggccggcgccatcttttaggcgcccaggctgcctacaaggtcatagaaagatatcttatggagagagaggaaagaacaagagtggtttaaaatgtgagagcagagttatgtggacatatcacagtgttattgtgaaaatcagtgacagggagtgagtgaaaacatttccttatctgttcctgcaagcataaaactctcaatgtagatctcagactggacatgaggtaattggtcaatccatagagacaccctgataatgctatagcaaactggcacaggcttctttgaataggaaaaatgtgtatcacaaacgctttcggtgtttgtttgtttgtttgatttttgtggaagttgagaagtggttagatctagttctgaacatctctgggcaccatggttgtttcctgtgaaatatgagtagtcctatagcatgtgcatgaccccagtgagcctcctctgcccctcctgccctgctgcaaaacaattgttttttccttagcgatggagcagtggatcaatggccgcccgataacaatctattttcacatcctccaagaaatgcagtcattacaaaaaagattggatttaagtaataactatttacaaaactgtcaacagactcaggaatccgagttctaatggtctgcatccataataaaaacagaaaatcagattctccagcctcctgagaaccccagtccattgctgagtgaagctagccttcagctcggatgttctgacacagagtatctgctgggttaggtaaatacgttgaagaattcaacaaaaaatttaaaataagaataaggtaaatacatgtaggacagattttctcttcaaagctgagatgacattgcatatgaatgaactacaatcaattttatcaacagccaccaccacagcaaaactaacaaacaacaaaagtgttgatttgcttacttttttattaatcattttattcctttacattacaaatgacatcccccttcctggttaccactctacaaaaaccccatcccctctgccttcccctccccctcccttttgcctctctgaggttgctcttccaccctctcacccactcctacctctcacccctctagcatccccctacactggggcatcaaacttccacagaaccaagggccacccctcctattgatgccagataaggccatcctctgcttcatatgcagctggagtcatgggtatctccatgtgtactctttggttggtagtttggtctctgggatctctgggtggtccagtcagttaatattgttcttcctatggcattgcagtcccctttagctccttctagctcttccattggagtccactcttagtccaatggtaggctgtgagtacctgcatttgtattggtcagactctggcagagcctctcagggaacaaccataccaggcaggttcccgtcaacaagccaacaagcacttcttggaatcagcaatagtgttggtgtctgcagatgggatggatcccaaggtggggcattctctggatagcctttccttcagtctttgttccattttttgtctctgtttttccattggacaagaacatttctgggttaaaaattttgaggtgagtgggtggccccatccctcaaatggaagcctatttactgggggtggtttctacaggttctatttcattttgggtggtattttggctaaagtcatccccattaggccccggagcctcgtgtatccctgacatctaggagtttctagtggctaccccccagttctccatctgccccatcccaaaatcttttttgatattcaatagtgattttaatgtaatattttaagaattcaacatacaatttaagcttaatgttcatggatagaagcatggatggcattatgtaatgaattttcaagatgaggacatacagatatcaatacattctgaataaagtatcagaatattagtggcccctcctctgagaacccacacctacagccagacccaagtagtcacctcctgcccacagaagtctcacatcggagggtgttgacgtcattaagaattaaacagcatgtgatgtgtttctttttaatgatattggttcttctctatgttatgctcatgaaagctctgcattcctgcttgcagcagtgtttaattcatttctcttgctcctttgtgtagatattcattctactctttgtggcatttgaatgactatcagtcgtgaacggctgtatataccttttcaaagtattcatgcaaagtattcaaaggccctcatctttagcaggctccccaatggttcctggagtactagtagtcacttccagcaggcagtggttcaccttgctccacaccccttccgcacttttcaaatccctcatctttttacatatttcttgggagagtgaatttcatcagattcacatttccttttttctcatgagcagtgaagtggagactatggttgtatgttggttcggcatcttagtaattgtgtttacagtctcttctcatacacatatccccccacacccaagcactcctcacttactgtatgctttgaatgttgtgggtcctgtttaaattgtatgcctagtccacatgtgtgcagataccttcctgtatctcttctaagaacatcttgtttcattcttaggtttaagatgtacctcaagttgctggtgtgtagaggtcaagattcagttccatcccctatttgtgtttgtcagaccaccagcatttgtggaaaacatcttattgtcaccacttcttacaaatagttgaccttatacagcaaggcactgtgtgtggttatatttgcttctgaaatggcagttttcccacctctgcttgtccatgtcttgtcaccacagtgttggttaatgtgaaggatgtatgattgctcctgttcttctaaagattttttatttaatcttggttattggtgtttcgccgtgaggtttagaatctgtttctactgcagcaatgcctcttgggggttttgactgaggttatattaaatctatagatcaatttaaggagaagtgacaagcttctgataccgagcctggcagcctcctgaagggtttatctctgtaggacttttctatttctgactgcacatgtgctgaccgagtgtatcttctggtagctccccacccgctcaccccatatgttttatatcttcaggttacagtgcgtcattcagaagtttatagttttatgatctaggtccagtttctaatgatatttctagtattatgaagatgctaaacattggacccttaatagcagtaattaaacaaaatctagcttatttaataatgtgctatgaacacctttacatgttgcacattgttctgtgcaattccagtttctgtaatgcagtcttccattcagtcattaagaatttatttgattttggtttaggctattacatgtagcagtgctatgaagagacaggtaagagctctttacagaatcagataggttctggaccagtgctagactctagtggtgcatgggctatgaatcttcttaccagtttggcctctagaaatgctgtgtaaattctcttctttccacaagtgtttacaagctcctgtttccagacaccatcattagagttcatagtcacacctttattgtgtgttttttccccacaagtgttgcacctaaaacccatagccatcggtgaactacaagtatcatgaaaatgctttttcttcctttggtttttctatactgatgtcataactccttgattcattcctttcccttaaaattgcaagacttccatatgaacctgatgcatgctttctctttcacataggtgacagcctagatgacgaagccatctcttgattgctgacccactgaccccctttatgttatgttttctggcatctgattggtgtccttttcttatttatcaaaggatatttgtttttgtctagaaggattgagatatggcacctactaacagaatgatagcatagtgttatttaccatggtgttttctctggacattatatgaaacaactttacctttttgtaaatccttaagatttctgaattgtaggtgagcagtggtaagctgtgaaggaatcacagctcttctctttactgcggttttaaagagtctgagatcatactattgaagcaatcgtctggatacccactggtctgtctaacctgccttgtatattgaacattgtgtttggtcaagtaagatgaccctgcagacaagcttaatccccatgaacaacattatggaaggagaaaatcaactatgacaatttgtcctcagatgcctccccactctccagatgcacacacttgtgtgcatatgcacagaaattaaatatatgttataaaaatgaaatactttctgagtgtactttgatggttttctgcctgcagctaatgtgatttatagtgacaggaggcaaatgaaagaaagtaaattttctgggattgtgagataccaaagctcaagttggccactttgtgcttctctctgtctctgcttctcttctccctctttgcctttgatcactgccaagacaaacaagttcacagatacctgtgaaacatttcgccatcaacatattctcctctggcatcatcttatgacaattgataatcaactttgtaaagtagacccaaggtgcaagagttcgaaaactctgtatttttttctttcttttaaagagatctttgcatttttcttctgttctttcctcatgaagctagtctgcccccaggcctaccaccccctacactgggaatctgctgagtccacaaaagtggagggacgatacagtaatgatccggtgtaataaaccagccaaataatgctctggtttctcagccttcttttccagctttaattaaggctctaatgaatatgtacttggggcttagggtttatcacaaatgaactatgatcaaatctcattacacagctagtgtggaaatgtgtctttttatgttggaaattattgctctgcagttgtatggcagaggaaaattttagaagtagctgaaatatatattttcgtctggaaagtcagagatattcaaagtaggttataatctgcatgaatgttaaatattggatatgatgattttagggtaacatcaagatgcttattacaaccattttgttttgactttatactttacacacacaaaagagtgaacttttccacttggccagtttctttacagtttatgctttttaaataaaataatattgtgcttttctagaaaaaagttgtgtctatgtcattctgaaattagtagttctttgatcaccattttcccttctgcaagttaggactttagttttctgtgtctgctaagtattggaaactttaatttgggaaaggaatattttcctcttaggcaacgctttcatggtcatgcaatgcagctgacctaactacatatctacacgtgtctattaatcaataactgcctaagattgctaaatactttccttgtgcttttatgacattaccttttgtaaaccttaatcagagtgtgacgtgtgtttctcctaaatggcctctgatgtggtgcctctcttcagttctctgtggtttcctgtttttttcatacatagattaaagacttttgaggtattaagtatcttaactttcttctttaatggtgcttcacacctaagctttcgtgcaggcctgtcttgctattttgttttcaggctacttcctacaccactctgtaatcacttgggtttgtgttgggcagtccatcagcacagttttctattttccccatttggatcatcgagggatatctctgtatgtccctcaaagccagaggtggtgttaggcctttccatagttaagtgcctctagtgtcattgccaggtgataggtatggcccatcagtggctctgagagaccagcagaatcaacactcatttaaaaactcatttaaattgctcattctctggcccctccccaggcccacagattaatttaggttccaaattctctgtgacaataagccctttaaatgacatagtctgtgctaacaatttactactgtagataatgatagtaattcagaatattcaagttataactgtatgtgatctttagtgagaaaatggggattgagagaggccaaggaaattttcgctcatttctgctcagtttctccagagacaatggtaaagaaaaactcaagattgaaacatgtactatctttctcacacatgcatatagctcttgtgtcctgttttgaagactgaaatataaatgtttaaagtatgaatagtttcttccttccatctattcatgagtaggaacttggcatgatgaaaggaggaaaggttgctaagaaacaaatgatgggtgttacagattttcatattgggaaggagggtggtcaagggctgggaatggctgagttctaaaagggagagacagatgttcccccaaatctgttcactagtcctcaaaaattctgaagcatgtcagtgcatggcttattgaaactgttgcagtatgatatataataagatatattgattggtaggaagagaataaaccaaatcctataagatggttacacttatgaaagacactttctagttgcattcataagaaacataaaagaacatgtgttttcacccctacaaaaagcatctgggaggtgggaggcggttgataattgatgattagtctatcttcagcatgcaaataaagagttcagggtggctaacacttggaccctagtgccctctgtttgatatgcatttagatatccatgacctggatatccatgaactaggattcctagcaaacacagaataatcaagtgaccatattccgtggagcctgaatcatgaaccatattttcaactattccaatgcaagcctgctactgctgatgttatggcttccatgtgctgccgtgaggctctgccgtcgatggccctgattccctgactcctgcttttcccttgcacagaactattgtaccatggaaagtcttcagacagtgcctgcatgaggtccatcagatcagctctggcctggaagcaatggctctgaagtcaaccattgatttaacttgcaatgattacatctcagtgtttgaatttgatatttttaccaggctatttcaggtaagatatacccttattttatctatctagcctctccttccctcccttcttccacagctccgtatgtgtttcttttctctcttatatacacagtatacacaaaggtatggacaacaacctcagtcttggtagccagtcattttattaatgtaagcacttggtcgttcctctacgcttggactgagtcctctggtacaagcttgtatatcgggttatgtgatcctggtaggttgctaccattcatgaatcatgggaggaattcatgaatcatgggaggaattgtttttaattccctgttctttcatgttgttagccttttagcccaatggctgctagattgaaaactttataggtgggtgtctgccagaggtatatcccaacatctctttggctgtgacattctttggatcagaagataaacagtaaacaggccactgttctatctacatagtatattatggtcctatagcactttgcaacttgcttttccctttcaaccagttgtaactaatatttttccataccattagatattcttcatcagtatattttaaaattcctttatgatattatatcacaactttatgttaatattaatttataaaatctattcagtttgttttttttttttgctttttccaataacctttttttgtgttttcaatattagtttcacatgatgttctaaagcaagtgacataatactgaaatagtttttttttcttttcttatttcacatatatatcaaaaccaaattctctaaatgcaaagaattaaagcttgtgttttcacaaacttcaaaacaaagttgtgtgttttgtatattatctatggggttgaattcaagcacttacaaaataaaatcatccttataaagtgattacaatcctagttatgataattatagtaaatgtggtaaaattgactagaaaccaagcttatttgtatgctaaagtattgttttaaacttcaatgtgatctattctgcttgtaatgtaattaagtaaactgttagattatgagagtggcttcaggtttcccatactatggattttttactttacctctggctgaaaaggctgatgtactgatttctgtaaccagaaaccgctacatgggctcaagttcaagtagcttggtgagaggagacagactctggcggacaacacggggcacattttactttatcacgattgagaaaccatgactctccatccactggatgtggaagacgaaattaaatactgggcagtgtatgtgtttattttacgtttctagtggcttaatggttgttctccttgatgtatatatgttgtaagcccattttaaaattatttttataatacaactgtagcgtgtaatttcaaaagatagaaataagccttgtagaaaaacatgttgctcagtagttatcatttacaacctaaagctcctgacttaaagatttctgatcattttgaagagcgaaggcttcacttttaatagagaagagggagagggagggagagatgactgcagatagatgatgtttcagtgtggatgtcaagtgctctattgcctccttcacacataactgtgtatagacagcttcattgtagttaaatgttcacctacactacttgactacttcaaggtgcatacattaccttatatgtagtttcacttaaaaatggccaagtagccttacgattctgaggtttgcttatcttgtgtgtgttcgctggggtgtgaacaggaaagtgaaagcataggtaatgtagcagctgtgatgaccttcacctgggcagatgattggcaagcgtttggaaacagtccattgtatcagcgactcaccaagtctgacgagtcctcggatttcagagggacttctcattccctctgaatgtactcactgtttaaatacgtcaaccataatcatcatacgcaaggctttaaataagaaagttgtcctgtggggtttgggggtctgaaatagagtagcatggctgtttagaaagcagtgaagtacccaagagatgaagtggggacggtacaggaagtataggaccacgtcacctttgcttcctcccaccctcttcctatgtctgcagggaactgaagcaggtgctgtgaagttgagaaggaagtggcagccttgggtggtcctcctagctcctcttctctccggaggcttttccctcctctttctcctcttcagctcaccaaagggaattgatagaaagataatataagtcatgcagtgaatccagggatcttttccccctctcccttccccaaagctgcaagttggtttcttttcacatttgccttattgcaggagaaccctgggccattgggagatagtgtgtgtggcaggtgtagaataaggaagggatattttagagaacctgttagttaaagtgtgagttcaagaagtagtagaatagaaaaatatctgagaggaaggaagccatcagtgataccaagccttcaaggagtgtctgactagattggttgagacccctcttctagcataacacagtgcttctcttaaatgcacctcagtacattctgttatttattaacagcctcccagaattttgtgaggaaaaggggtttccttaaatcccagacaagtgagttatagaataattaaagcattatttttctctgaagcatttatttcttctattttaagctggggggggggggatgacctccgactgtgtgaatttgttgccttcacaacactactgacacctcctatcacataaatatttctgcaataagaagctgccctctggcttaatatctctggggatggcctagccttcagtttcatcttgttttttgtttttagttgtattttgatctgctaattggttctctttaaactttcggattagaaacaatacataatttcaagaatggatgccgacattaatgtaagcagctctggtgtttgtttgttattccctctagatttgtcctccatagatggtggagcaaaacaataaaatgaaaactgaagtgtctggcttggcagtcattcctcagttgcctttttgacatgtgctgatattttcccaagtattgttttatgcaatttcagtcaagccctaagaagaaaattaaaaacatgatgtagttttcaagtgcagggccagtgtctctgctgctagtgttcttggggctcctttctaacccaattagttgtgtcagtgtaacgaggaatttccctaaagagtattcttgttaagtcaaaaagactaaatggctctttattactaaattattctttcttgttattcttattgtaagagacaaggtccttgcagagttctgccttatatgccaggaacatgaaaaagtttcaaaacaaatgaaagcccgagcgaacttgcctcacgtaatcaagaccgggtgcctgtttcagcagcttgaagttggggacatgagacacctcctctcttttttttttcttacatagaagatttgagtgacgcgtctggcagaacagatggagcaagctgccagtgctctgggataaatgtagcttcagccttggaagtattgcagtatgattcatccacaccccgcagcaaagttgcctgttactggctgcctctcgtctcttgccgtggtacctggagagacacctaattagattaagagagattgatggcaaacacatgttttcgtgaaaagctttcctctcactgagcttcctttcaaacatttcccaggtccattaactgggctagcataaagcaagtgtggggtctggagcctgttacctcagaaggagcctcccctctaaagcaagcctgccgaggtgcaaccatagcaacctgatgaccgtgtatgtgatgctgcctggatgactgggatccaggcctgagcagcgcaggaatgctccttggccttacatggcttgtggtgattgtgtaacgttttccagaacacttaacttttgtaacgtggcttcctgttatatggtttcctgttatatgaggcagcagtggacagaacagatgggaaagatgaggactatagagagataattttaggtaggagggtctaagagggcctcattgaggaagagttggtagtcatctgattggttgggatttgaaaaattcaaagatcctaaggtaggggagggttttgtatttgagactggtagaaaggccattggggctacaccaagaaaagccaagtaacagtgctgccaacatgtagaaaaacagccaaggatccaacctgaaggccagttggtcaatctttcatttcgtagtgatcacaaattctctattggctgtctacttggttttccttttgccctctctgttgtactccaaagaaatatgttttctatttaaacatgtttctttaaaaccaaaaagcaattgcctatttgtcattgtttacaaaggttgatctaatacttatatttacttaaaaattatcaaagagcctttctttccctaagcatgagaaacagtgtcatcggcgtgtgttctctgggtaattgctttccatttatttatgtgtttagccctggggctctattttacggaattggaacttcttggctgtgactcacccgggatacatggcatttctcacgtatgatgaagttaaagctcggctacagaaatacagcaccaagcctggaaggtaagcactaatctggacgatctgcttaaggagaaaacgccctgctgttcccagctctgagaattacccatagcctccaaaggcaaggtagtagggaaagcaggaagactgactgagagggtgcatattaattgagcccttaagttgacttttaacattgtcaaaagtcaggagcttaataagtttaaagattctgtaatcctcagttctctttctcaaatctgtctgggatgttttcacagtagttttgttgggtacacagtgttcctgctcaaacttacgtatgtataattgaacccttgagtattgtacttaagacaaaagtaagtagtttacttatgtgtgcattattttagcacagtgttgagtagtttcaggtagcagctctgattaaacagaatattcagataagtacataaaagtatatgaatttatgattacattccaaactactcccatgcccttgtcagtttggcatgacccacttctttacatcttcaaagtgttatgttttgcttttcaagttactaacccaagtgactatcagagggcttggtttctagtcagttctgctggcatcgtccaagaaatcattcctcacgggcaaataagagactggaaaaatctatctttctcagctcagaggatgttcacacatgtgtcacctaaatatgtgttaggcacacaatcaatgacatctaagaaatagtcaataatacctaagcatagtcctggggacaatatcagtgacatcagagatactccctggaagactttacgttttagagttggtcactgtaccattagactgttccatttctatgagaaaatgttttctttttttaagtctatatttctgctagtcatctttatttgacttagaataattaagcttggcctttgacacagttttctcaagtcaaagccaagagttttaattccttctctgataatgaaaatgctcatgttcctaaagatttaatatgacatatttaaagaagctagtggtatgaaaaaaagtcagagtccaattgacgccctctctgtaaaacctacagacatgactctgctgacccagagcagtggtcagttaactttcgtattttccaaagtttagatgaatcattttgcttcattcaaagttcattcaatgaaaccaatactagaaagcaaattatagtacgtgcagtgtgcttttactatttaaaatacatagaaaacctccttatgaacagatattcactcgctttgtaaaatatccatctaagcagccctttctcgtcaaaagtatttgtcctctggcctcacatttaaaaataaaacatttaattccattccaaggacactgtggttccttcagtagtgatttatctgtcataaataaataaataaataaaatgaaatatgtaatatgatatatatcatactatatattatatataaataaatataagactaataaatcattagctttttgccctaaaagaatgtttactgagcatgcagaagggcctgcatttgatattcagcacccttccaaagaagtgggaatctaagaaaatcatcttttcgtgccttttagtattaagggtggctttcaaccatgagctacgttatgacacagatctatcagattatgttaatcacaccagtttgcagaacaaggtacaacagctgaaagtaactttacttcttcctaagggaggtgagacccgcaggggtcagcagccaatgacttaaacagtgttgggcaaatggaatcgagcagaatgctgagagaaataaatcgctcttaagtgtcatctgtggccctcacaatgtgttactaatggcacactttgtagggagggcttgaactcctcagtaatgactggttttagaaatgccatcatgaaacaatgcaggaatttcacaaatattcaagatgcataaataggcaatcactttaaaaaataaataaataaataaaatgtgtaatatgatacatatcatactatatgtaatatataaatattaagtggtgaatttttgaattttcttttagcatcacattcaacgtgttttctaaaatacataggccccaccatctctgagatttctacattttgttctttatttgaaagtattatgtgcactttttagtaagtttttctaattgggaagaatgatttactgagtgttaggtatgaacacagtgtgatgcaggtctccctagaggtcagagaggggatcacatatcctggaactggagttgcacgggatgtaaaacaccttggtgtggttgctgagagccaagcctaggtcctcttcaagaacagcaagtgtccttaactgctgggccatttctccagttcattccttaatgtaacaagtgatcttccaaattataattagacactctatattatctgagaacaattttcattatgtagcatttgtctgatttgagtggaaatattttcctgtttctgattaatagtattagtaatttatatgtaaatactttatcattagggtcacttaggggcatcagtttatactaatttgaaaatccccttctgagaactctttgaacaaactccctttttgttcaaagcctgattttcttgttaactgacatgtaattgtacccttcaccatatgaggttattaaatgtagcaacaaaccatcctgtatgataaactatagcagcatgtgaagttttttttagtgcactctatttatcaataactaaaacatgagaaacttttcttgcttttccccctgatgtatgcattcatataacaacttaaatatagccagtaggtcttaagatgacttttggtctgattgacggacagattgtatagtccagatcccaatatcttgatggcaagattgagtggcattcaatcctacaaagtgggataatgtactgaaataaataaatgatgatggatttaaatcaacgccagtatctccctttattggaaattaatttaagagatttatcactcatttgaatgaccggtgtttgaattatgttcgctgcctttggaaaatatttgaatggcaggttgtgtagaagctatgaatgtatcacatgtgctttgtaattgatatagttcagctcctttgaaatttgtttaaagatgaatcactgaaaggcttgcaagaaaacattaaacaagtctatgaccaaattttaatgcctaaatggtaaagtaatatattgaattcctgtttcagtttccatggtggataaattaattatttagctatttgcttcattttatccttctccaaagatgatttatgtcacagctctatcacagcagccacatccccacacatctctttgagggcggtaataaatctcttggtagtttccagcctcatttattttaaatagaactctggagatacttaaatgaacaagaattattatcagtgtttcttacacagattgataacactaaggtacagtagtgttagattgtggaaaaggattgaaatttctatcaggaattctaaatgatgctgctcaagaagacaaaatattaacaaactgtttactggttggcatgcctccttgagtttgaacgaacatctttttaccatgtttcgtagttacattttccggttaagctgcactcggctgggacaatgggccattggctatgtgactggggacggcaatatcctacagaccatacctcataacaagcccctgttccaagccctgattgatggtagcagggaaggcttgtaagtatgagcaattctttcaacttgcaaatttcataactagaaactgtctgggcatagagcataccatgggcatagagcaggcgagtaaggctaatgatctcatagtttgcggtttaccttaagacgaaccaatagcaatagtggtgccttcagtgtgttgctcatgcctaagctgcaattttatgaccataattacatagagcagacacatcccagcatcagaaagcattactaaaacataaaggcactcttaaaatatgtgtataaactattactacttcagagtacttcatttctgttattttgtgtaaagctaaattgaggctgccttttgtgtggagtactagatttttttccttcctaagtcaaagaaactctttgctctgtttgttactgtgtgagaatattctgtcctataactccaattttctccttgtctagcagaattttctaatattgattactatgctgtttgtagacacttcatttaaagaaggtttttcttttgtcatcaacattttgcagactttttcgttaaaatagtcattactgtgcacttttaaacttttattaagctctacaatataaaaaattttcaaaaggagtaactgtgagttctagtcacttttattgaactagttataccagcaataacattatggtcatgttttactaaaaatgacatttaatgacaataaccttgactttcagtatacttatgaacgaaaatcccttattgtagctttagctcaagttagattcttagtagaaaaccttgatccgcaaacctgtctgtgtggctttattgaagtcagtgaattgtggaattgtcatactttccagtttttctgacatgcatgtgcacatattacaaggtgcatatttgggcattgtgcatatgtgtgcctatcggcaggagtggacagagtaggagagaaagacagggatgttgggaaaggacaccatgggagagcttcattattcaggccatagctatggcctaatctgttttctctccttggaattttcaacatgtaataagtatgatgcagtttgatgcttccaagaaagtatataacaatctgcaagtagagcttgatttaaacagttttaggataggctataactcactactaaattaactttctaactttatgaggactatattactaattgattttaattgaaaatattatatagtggattagtttatattatacttttcctatgattgaaaaaagaagtgcaagagtatggtgttgatttatgggaaaaggacaaatgaaaatgtgagtttaaatatagagtactctgattaaactgaacacactgaagcctcatacattaaaataatatggtctctgtttaaattcagttatctttatcctgatgggcggagctataaccctgatttaaccggattatgtgaacctacacctcacgatcatataaaagttacacaggtaaggagaatttttggaaagataataatacatatctataccaccccagaaataaatgtaaacttctacctacattgtgttcaaaagcatgccccagtgtttaacatgataacatcaggaattctgagaatacgaataaattttatgatttcttttagatacatttttttgttgttagtgataatgcttgtaatctaatatatatatatatatatatatatatatatatacacacatatatacacgtacagagagagagagaaacacattttaagtatgttcatacattgataaacagtaaaggtcaaaggtggtagaaaattttttattggttttagtgtccacagtcttgatatgctgcagtatgagagggtaccagtattcatggaaggcttttcatagatgactgccattcctatcaatgtatagcagttttataatgtatattctaatatgtataaagggatactaatgagagatcactcctctttctgaatccactttgtaaattgaaactggctgggcatgacttcagaagacaaacaccttcctggcatgcctgagctctttagtttgaactccagtgttacaaaataaaataaatcagttaaagtgtacataaatcttccagaatattgcgctccctagagtttcacataaaatagccttactcctgagaatgcagtaaattccctgctcgtgacttgagcatgctctaattgcagaccgactcgggcagatctcattgctagagcaggatgctcaggcgttcattcataagttggcatgggttatttggtaataattcttttccactttctttcatttccttgtccttatttagtttactaaatatctggcaaatatcatagtggacgagatttttatgtatccatgcatgcattcatgtatgtgtgtatatgtatgcacaactagaacattacaaagttttagtaatcacacgataagaatgccatttatgtattctatttcagtatctgttcactgaggttcagtgtgccaaacattctacactcgactcagccagtgtttagttactcagatgcttactgttcacatccttcagagttagaaacttactctcgaatttgagagcagtacctgaaacctcatggtgagcgaacgctgcgctcgcactcgtggactacagtaagtcaggcagcaagcacgcatgaggaacgaacgttgcttatccttcgtcctcagattcctaaagatgcctaagaaataaaatgtaacatccagatgacacttactcagtttgtcagtgtagacaaaaaagaaaagaaaacaagaaaaaaagaaaagaccgagtcatttatattgtcatcttaaaactgtacgtactgcctgttgctggtaaagcaagttctttcttaaagcaatagcataaaataaattaaataaccgagagcgctaagaaagaaaagcttacatataaactgatgccaggagttcggacgttgtaaaaattgatttttttagaccaaattgtgaatatcaatttaaaatgtgtccttaaatggtagcagaattctgacaagttcaagtgtgggatatttaccataagtcattgtattttagggaattccatatgacgacttcatgctagtaaaccattaaccgccggcccttcttccctgtgttccaggagcagtatgaactgtattgtgaaatgggctccacttttcagctctgcaagatctgtgcagagaatgacaaagatgtcaagattgagccttgcgggcatctgatgtgcacttcgtgccttaccgcgtggcaggtactgccttgttgtctgtcccgttcacacttcccctctcagccttccacatcttactgactcaggaagtaatactcagaactgttttatctaaaatagtaacttacattaaaaaaaaaacttactatgttgaatgcgtaaaattgatagctttgctgcgttttatattgtgtttcttacatgcgtgtaacttaagttcctgttgattataagtggttctgcatccgtcttgccgttagtgtcatgatgacgccaagagagagtatttaccaggtgagcgcttccagtcagctcacgtcgtgctcctgggaagattctgaagttcggtggaccacagcagatacagcttacgctgctgccgtccatcacatttctcttctcctgagccatgggtcatgtctcacacgtgtttatggttgctttcatgaaaccaaaacaggggaatcagagaaacatgactttgaagcagtttgtacccaaacaggcaatttccagttttgaaaaacgtaatcaaagactatcttccttcctgcccgtgggtagtcagtcactaaatacaaaatgagtcagtggtttagaataaggccgtggaaaagctgttttcccaccgatgactttttgttgtggtttaactgttgcaacagttggggatttaaaatggttatttttgacacaattccagttttagctaactattttgatcacgccatcttgcaatttgctctttaacggagccctgttaaaactaggagtatgttgctgtaatttggcaatcaaaacacttaatttttaaacctcagccctctcattctttggccatcattttctaaccctgaattccgatgtaaggggaaatagagcagtaggggagcgaggagtatgaaaagagctgtgtcaaaggtcatggtacctgtgcaacttgtggattggtgaaaagatgtaataactatcacaatttcaatccctatgtgaagagagcttaaaaggtggtgttgaggagacagtgaagtctagctgatgggatacttctagctgattcacacacttctctgtgcactcacaggcatcgttatcaccccagtcaacctgctcagcatctccatggctgtcctctccgacatgcttttagtatatatgtttccttaagttttttttttttttttttttttttttttttttttttttttgcaatctattcattttgaagatgaatctgcaccttagaggtaggaagaaagggactcggtgtgacatcaggaagagttgttctcagccaatgggtacccaccttgctaggtctgttaacagccatcattctgtaaacttagcaaggggtttcttgaaactgacttgcgataaattttgatttgctgccaaaagtcagattcttctgcaccttaggacatttcagatgaaactgtacaaagtgcggttgacctttcacctcctctgactgcctgtgtaggggtatttaggtctgcttcacctgacacgcatgcaggatgccaggatgagtgctgaactgagaagaagtcaagttgtatcgctttggtctagtaatgccgttcttaggcattcctgagaggggaagaaagcttctttttttgcttttgtttatttgtttgtttgtttttattgttttttttaaaggaatgcataaatttaggatagtgcacacccgggggcctcaaatctgcaatacggccatgttatgcattctgggaattgacatgtttgatctagtgctgtgcttactattgggaaggtagatggtttaacatggtgctatttgcttgactgggatgaaagctattgtttaatacactctgcatatgtagcttaccttgtagcctaaggtgggtcttttaactgtatgcttgagtgtaaaacaagaaaaagtgtggtaattctgtatactctttgaaggactgcttatcatcttttttcagctttctgtaaagctttgtttcagtctgctgcataaaagggcatggcattcattccagcttcttcctcctgtgttgttgatgctctgccccttacgttaccacagctttgcctatagttcctctttctagctgataatcagttcccggatgccttgcatacattttcatagtaatgttagagaccttacatgtagatatgtccagtagtgttcataaattattagcccttactgtttccccttttaatacttaactccctctcagtttcactgtttgaaattggggaagtgcgtgcacgatcaagcactggaaacaggaggaaatcagtagacgttatttgaaaaagtgctagtaaattaataacttattaagtaaaattttaaaaagtaactatttcaaatgtgttcatgaaattgaaatatgtctcccgttaaattacacttacaccactagtgagtactgttatcttaaacagatggtcagcttttgcatatagacaaagaaaaaatggcaaaattttgatatctcctcacaaaaatagtattttaataaatgttctggttcagtctgtacaattccataagcttcttcctggttacattgtaaacatgtctatgtatacccatttgcagtctagagtatggatttctgatacagggatcgctttgcatattcatgtccgtgcatgtaggcggttacccaatgctgattttcaggtcagatgctatgaaggaaagtggagggggtggggggggggcatgagattcttctaactggacagtgctgtaatcatcgatggaaaacctcatggagtgcttgttttagactgttagttcttcatgagaaggcattacctttcagagaccttggcgtcctctctccctgacaatgtgcctgaaaacttgtagccacaggtacatgtgttctgtgctgtagacattgtaccctgttatttacctctgctgctcgcttaacctctggcacagatggccacaagacctggcttctacttactgtgttctctcaaggaatatttgcagtgacgtctgatgcacattttcctcatttttaagtaacttgtcatttggacatggcttgaaattcctaaagtggcagtctggaatcactgcatctcagtggggtatcactagtgaaaactcgataatcagtaaaggtgtctactacggggtaaggggcattcctacatccacatacaggtatcactcaatatgccctgctgactaggttatcagtgttcaaagccttccagttagtgcatgagcagcaatattgtgtgatcttttagacatgttattaaaaaagtttcctttattaagagcaagtgttacaaatttaattcaattaaaacatagtgaaaaaacgttcagtaacaagcccctgttgggagtgtcagtttgaggctcactggatttaactgatggtgtgtgcctgagcagagcacatctatagaacatttctttccttctgtaatatattgtcaaaccttgaatctaaacttacagatttactggaagatttctgagtttcggagctctgggctgaaagaaaggcaggttgtaacagatgtctctgtgtttttactttgcccgtgttccaaaatgatacagtacagggtctttttttttttttttccttttttctttaaagctgttagttttacttcacgggattttccactgttacagccttataaaaagttaagcttttaaggtcaatcatgcacagcacaaatctatcgttgaacaacaccctttgataggaacaaacctgggcacgtcaacatttgcttcccgagaagtcaagcctgttgctttgacttttattttaaggaggatctcttgagcagctcgtgtctctatagcaatctctgagcagaaaggaagttcagacgtagtttctactttaaactcactgctagaagttttatagatgggattactaccagtaattacctgaaacgagtatctgcttctcctgcagctttaattagggacatgaaaccgtttcctctacctttacagttctttggttaggtgtgctgatatgaaaatgcttttagggaaatgcatgcctcccaaggagttaggatgtatctgtcagcatccaacagggaacactgaacctggactacaaattataatgtgttcaagaaagtgcatttttagcaagttgttcttcactaaaattgtctttcatttgatgccctgttttagtttaactccaattcattggggacttaaatttgatgtaattaacagcaaacctaacaaaggcacagtagtggttgctgttacagtctgtcagtgggtgctccttaattgctgtcataatggcctattagtcatgcctccaaagaggtgtcagattttttttttcattttctgaaacatctgtgttatttaataaattgaataaccacggaagagtttgcccagaataccaagtaagttaaataatatgctttgtggagcatttgaagctgagtttctctgggtgcggcttctctgtttcactcttgatcagtaaagctcgcgggcacccctctcactttcacctgtcactaagaggcagagaaaacatctccatgcagagtcccgagagcatcttcttcctgtgtacacagtctgtaaagcactgcagtaacccagcagcggcactgcacacagggtaaggtaaggagctgcgtctctcttgacaaaacagaggcaaacaagcagttctgctaaaccacgtctgcgcttccagatgacgcaggcagcaaactttgaatgtctcacataaaaaaggccatcactgtcaatgccacgcagctatactttgaattctgccaacaaccctagttttatgaaatggaaacttaacttctgtggcttttcccctagacttttcttcagacacgtttgcaggaaagacttttctgtgtccaaagtgttgtaagaaaacagtgagtgcattcaaatatgagtgtggcgttaatgccgtacgatcaaatagagcactgtggagaggcaaaaatctagctcactgcgtatgtctcagtgagaaacagatatgattctggcttattttaaaagcaacattcgcatgtctaaccttctagaaactttttaacgaaaactaaaacaatatttgcttttaagaccgtttcaaacgtacatttctctctttgccttctactgtctcttttctgggttagtgtgatagaacagactggagcgtctctttctcagagggggactgaaggagttgggagtcttggtgagctagtgcaatggagcaggcgtgaggagtacccaggcctgagaggagggcgggttgacggtgaggtgtaaatcagagaagcctttgaagaggctggcctctccctacaccttgctgaggcaccgaccctcttatttgtgcccagtctagcaggcctcagattcctggccagtctcctgtctccacctcccattttgtccacaggagtggtgggattgcagacaggtgccacttatctgcatccaactgtctgttccagtctgcgggcttgaaggaaagggcctgtacctgtggaaccacctcacccactgcagcaaaaataaactcccggagaacaagtctaagttagcctaagtctgctaactaactcagtagacggattctcacagcaccacagtgtatttgagaactgaaatggacaatttgggaacagtattagttgacaccaacactctactgtgggctgttctttttgaagacttatttttatttgatgtgtatgaatgttgtgcctgtgtgttgtctgtgtgtcacagctgtatctgtggaaaccagagaatggcattgggtcccatagaactagagttacaggtaatgtgaaccaccatgtgggtgctaagaactgaaccctggttttctgcaagagcaataaatgttcttaacctcagagccatcactgctgcctaagccatctaagcgagttgctgttagtcacagcgcttcactaataattcagaaagcaaataaattacatgtgtaacgcttatcttaagacgtttaagagacaatgtgtcatggtgtgtgtgtctgtgtgtgtgtctgtgtgtgtgcgagagagagagagagagagagagagagcaagcaagcaagcaagcaatgtggtgattctggtaatagtttcaacttgcagtgttcatttgcgtgcttaaagactgtttatagtaaagcagatttgttttcttcattattttttctgtattttctatcattggattgttgtggcctaaagttatgtttatgtatattaatttaaggtgttaatggatggtatataaatctaaattactatatgatggatatattatgtaggtaatatttaggtaactagttttcactggtaacttctctcaccttaaattttgaagtatttctacattggggaagtgaaagccactgagtcaattagaatagaaggaatcttaaatacttcctcctaacattcacaagttgtgaacatcttcaggactaagtacaaaattatttattgttctttcttctccggtaacatatgttcttcgatcttgacttaagtatatgttgacaggaacattattttaattatcgacgccccatcctgatgagttatgtgtctattctagacattcttcatctgtattcaatcaaccatatgacagaaactagggcagaggaaccaaagtctcatttgaaaatttatggctatgcctcatttgcatacgacagtagttaaatgaaagccaaagagtgatgggtgaagtcataccagaggatacactgcagtcagtgtgagccacttgtcaatcaaatgggtagtcagtgtagctgttgacatttaacatccacgagatgtacatatgttagatctaagaaaagggatcacaacaacagccatgtaaacaggttggagaaagaccttaagtcctggtttataacagccatgcccgggctttcttgtgttatctgggtgctgttgcctatcaccttcttcctcctctctccacggaaaagtcattcaatcttaggaggaaagtggtagcgtaaattcaaacaatccttgaccaatgctgcaggatgatagttctggaagtgagagcatgataaagagtattacagcttctagtcgctgtactaacaaatgtacagctttatgattgaatttgaataaagtatttctagttgcagtagttgcacttagattgttaagtgacttgtggctaggtatccatactaaaatatgtgtatatgaatttatacagtgtacttcaaaataatagacaggtgaaagacatgaaggcatagaggaaacagactaggcatgaactgatcattattcaaggtgggcattgaatacatgtattcattatgctctatatcttaagataagcgttacacatgtaatttatttgctttctgaattattagtgaagcgctgtgactaacagcaactcgcttagatggcttaggcagcagtgatggctctgaggttaatttgatacaacagtgtttaaagtgtattaggaatgagatgtccacatagggcccagaattctactttccattcatttgtcacacattcttgttacagagaacgtgagttccttttcagcttacacatgaagagctcccttttttgaatgactcgatataatgtagatctatacagaaacaccagtacatacacacagtacgaactttaatcattacagtagcgagatttcatccagatgataatgcgtattaaattggtcctgtaactttaaggttctttttgtaaaattgaactaggaaggtttagagttctttaaagtttcttagtgttaaaaggtcaaattaaggagattacccaaaatggaagaattcaatcttgtttcttttaatcttatgtgaaattatgaatcacaatatttttatggccatcagctctgaacatgattgctatgttttctctctctctatctctctcgctcactctctccctccctctgctccctccctctctttcttcaaaatcatatgtatacatatgtatacacatgtacatatttatccatgtattatatataattgtacaattttgagtcttaaaaatatgtaaagacatataaataatgttgtttcttttaccaaagctattcaatgataatttttctttttggtaatatacattgtaaagaaggtatttagtctgttgatccgagagaagttaaaggaaacaatagaccaatagtatctgcttcatagtagacatctgggatctgtccagaggtgtccagagaactttttacaagcctctgaagccacactgttaaaggcaggtgattcagcttccacaggccaagtggctatagtacagtcgtcctgagttaagtacaggatagctttttaaaatcatgatactttgtccagcttttttttttaaaaaaatttaaatttttaactttttacaatgtaatactaatcttagtgtacaatatcaaaatgccagagtagtgactgtcttttaactcctctgtctagaaggcagggtgagagggcatctcattttgtctgctccctactgggaattttcaatgctgttagagcttagagatatgaatttggaaggctgaaccaaacctaatgatcaccaataaatgcgtttctcaacccaaagtattttaccaaatcttttgtagccgctgctttgaactctagattgggaggtagttcatgtcttccagtggtagattccacatgagcaagtcaagactgcaggctcggcagtagtcagcttcccactgttgagtcagaactgagctaagtcaactgaacgaatgaaatcttggttcatgactcctgaggtttcaggctatgcttggtggggttccttgctttgggctggtgataaagcacatgatggagccaagatgttcacctcgtgtcacctagaaattggcgagaaagattggaaagagggcagtgtgctgataacaccttcactgccacacaccagtatagctcactgcattccagtaagctttgtgtcatgaaggtgataaagtagagtgataactgagccttttagaggatgtataagatgtagaccataatgcttttagcctagatggttacttctcaatagttttattttccatactcattcctttattaaccaagatttgacaaatcctagaggatgtaagcagaaatatttacccacagttggtaagcacaagaacttttccaaagtagacttcaaataggttgcttagattactattaattattgctctagtcatttttaattttgccaggatgttctttttatggactatttaattagcattgttgttttgaagagggacataattcatttttcagtatttgaggactgtaaatccttgctcattagaactacaaatggatccgtgtgaaaattaagttaagcttctttacctgtccaagctttatttttttgcatttgctcataaaatattttgttgatttaccacctttgtgctcaactgcttcttcaagatatacccatcattgatccacagacttgtgaagcattttataaacgtccaaccttcagacttctctagattggtttgagccagtcagtttgttgtctttgttgcaggagtctgatggccaaggctgccccttctgtcgctgtgagataaaaggaacggagcccatcattgtggaccccttcgaccccagagatgaaggctccaggtgctgcagcatcattgaccctttcagcatccccatgcttgacttggacgatgacgatgatcgagaggagtctttgatgatgaacaggctggcgagtgttcgaaaggtaaacgtgagtgcacgagtgcagcttgtgtgctacaattaatactatttaattagtagtaccaatcaattagtctctatgtgtgtccttggctgagaaagcattgttgatttaaaactaaggttcaaatataagcagtattccctttttcaaaaaaagtatagccctcattccccatcatggaaatttctctttgcagctgataaagacaactgcccccccccgcccccgccccaaaatcccacaatgaagtgttagagttgtgcagcccagtcccagtcaatgcacccacagaacacccctgcagctaaagcttggggaacactgcaaagtggggaaaagatgggaggaaccagaggactgtggattttctttcaatctaacaatctcagaaggagggagtctcgccaacgtgactgggtaacatgagcagaacaaggacaacaataaataaaagtggatgggggaagaccatgaggcctcaaccatacacacataaccacagacagctaaggaatacagagtggagaaatagtctttcccagagaaaagtccaccaatagtttatccaatgatcaacagtcagccctgaaaacatacatacaagtaatattatacagactgagtgggttatatttaaaagtaagtgtgtgtgtgtgtgtgtgtgtgtgtgtgtgtgtgtgtgtgtgtgtctcaatgattagtaaggaaagaggccagacatttgaaagagagcaaggagaggtattttggggaggtttggagggaggaaatggaggtttgtgtgattatatattctcaaaaataaaaataataatttgaaacactacattcagtattaatcagttcagaaaaatattagatgaaggggaataatttgtttaaacctagtgggagtcagatgagaacatttgtataaaattaaaaatccaagaatgagattaacaaatgtggagaaaaatagaagataggaagttattttatttgaaatagtaagattgtacttgattaccatttttgttgaatataaaagtgtccagaaacgacatcctgctgctctatctataagaagtcgcataaaatcatctcagtgaatgcactataacttaagatttgctggttaagttagagcactgaccttatgaactgaaagtaactgctccagcccatcagtgattacttcacaaaagaatcagcgtggcagttgaataatttagaaatcagaaatggtgggtagatggctagatctcagactgccctttgtatagaaatacatatgaaatccaaattacatggagaagttgaatgctgtggacctcagaagtggcattggttgctatgagagcatctgtaattacgggaaccatctccctcctggctcctgcagacatgactactcagccacatccctctgaggttcacattggcctatgagctttccaacaaagccttaaggagagccctttgccactgaggtggagtggtgatgatggcagccactttaggaacttcaacctatgcccctattactatacagttgggaaagagtaggtgcagagtccagaggaggccatttctacagctaattcaaggctgattcaaatattgctgaagaaaactcttggaatttctgtccgggagttccacactgacctcagacattccattatcctatttacttgaaaaatcttacatgtgcaggtaggttgacatcaccagtgtcactatgctccaattcagctttgagctgaaaggatgttggttcttcaccctgttagatgtacataagttccataaggtaactcataggctggtgtttttctccccttttggggataacatctgttgagttttgttttgctttgtttaattatatggcctctttgacccaagagaaagttgttactcctcagtaactctaaataatgaatacagaagaaagaagtctcaaagagaattacaatttgagcgtccagacaactaacattcagccttccagataaagggagcagtgaaccagctctgtaacaggatagaactagctctgtaacaggatagaaccagctctgtaacaggatagaactagaaccctctgaagcaaactacttagcacccttcccataatctgcatcctcttgcaaagcacgacagcaacagccatttcctataataactgttgaaatgatccaatgaggtcacatatttaagaggctaacacattgtaacgtcagttggaccacaaatagtggctattttattgcctgtattaattgaaattaagaaagccgcagattgtgacccacttcccagtctgagttagtacagatcattgcatcctgtccatataaaaggagctacactggcacatcagggatgatgcttccccatccaagaagacatcagggacccagctcactgttctgccagtctggccatgcctcatgtcctgcgtgagagtcattcaaaatcaagaaaggatgcagactgacagtgagaataaaggagcggatgctgtaacattgcctttattgattgatgggactttctcccttgaagtaacaatttgcatatcaagtgaaatgtgttgaggtgataatgaagcaataacatagtcactttgattcctatctcttgatctgctcagcctaaaatattccttacctgaccctttcagaaagcttgttgccccaggtatagctttcagggtgcacttagtttattgagtgccagcctgggtaacctccgatggcaggaaagcatttgagaaacccacaacagctcagacagttcagacaatttctggggcaccggtttctagctaggaagaaggcatttctgtttttctgactaaagttcagagttctacaagaagattggggtgtggctgcaagaaaaattctctcgagaactttgtgtaccttgctacttagagaaggagaaaacacctgtcttatgtcagtttgaattaaattgaagcttaggcctcatctcataggactctagtactacaaactgagaatggagtacaaggtgagggacagggctgccttctgtcctctccagcctctcctgattggttcttcctgggaccctgcgaggtgtctatttggaaaatgagagactttcagtaatcctctctctgtgttgtttaacccaagagaaggatgctctcctgcattcttggctcacatctctcaatgattctgtgaccttcagtgttccactcccctacagcagtcagatattttagaaatgcaattaaattgccgttctttagttttaatttgatgtcatgatttaattaagtggctcttatgtctactaatctgtctagtcagttaagcagatcatgacttttgtattatttcaccaacctttgccacttagctttcatccttagttttggtatgggtgcaagcataaattctttctgagtagttggaaaaatattgctgcaaaatcatgtttctatgctgtgtttatgtgttttagtacagctgctgtgtagacttattacagaagactataagtgctaaaaccaggccacgtctaatgtttttgtcaccaagacacactcagtaattatctaaaataaaccaatcaatgcatgtgcatcttctgtctgagggtggttacctgatcaaatctcgtgctttaaaaaagaaaatcattttaattttaaaaagaaaaagttcagtagattttatccagaagtgagttagaaaacagattataaacaactcctaacattgacataggacactcttcatgcatgctcttcctgttttgtaagcatcatcaacttattctgtattttttttatttttagtcttgctttcccaactcaggagcgatgtgcatcactgaccaacaggaagattcaatgttctaatctgctacttccgttgctcgtctttctctcctttcataaactggttgatgaccgtattgtgcgatcgttcctgcctgtcttaagccttttgcctttattaaagtaatactccttccatcattacatagagaactgagccaactgtagtttcccgttaccatggagatttcacacttccagtatttgtaagttgcccatacagattgtttccttagcattctttcattagtaaaatatatttggtaaaaatggtggttcaaataagcagagagaatctgtgactgtaaaatgatgagttgttgcctttctagataggaagtcgttttatgatttcattcaaaagtgttttaagattttgtccagattggggccattatctaagtttctgagttatgagatttcccaagtaatttgttctgcgtgctgtgagccccaggaagtagtataggtatgatgggtgggaatgttggagttttctctgttattacagggacaataagatacccataatgctagtcagataacttcttaatattggaaaagatcagcaaattcttcttttaattgttttatttatttacattccaaatgttgcacccccttccccgttccccctccaagagttcttcatcccgttccccctcctctttgcctctaagagggtgctcctaccccccccccccgccccccaacacacacacactgtattcctcttccctggggcatcaagtctctataggattagattcatcctctcccactgacgccagacagtgcagtcctctgctacatatgtgccaggcgccacagaccagtccagtccatgtatgctcctggttgatagcttagtccctaggagttcccaggagtctgggttagttgatactgttggtcttcctatggggttaccatcctcttcagcatcttcaatccttcccctaactcttccataggggtccccaacttcagtccaatgattgactatatctgcatctgtctcattcagctgctgacagaacctccttgaggatagccatgctaggctcctgtctccaagaacaatatagcaccagtaacagtgttagaaattggtgcctaaccatgtgatgtatcccaatttggcccagtcattggttagcctttccttcagtttccgctccatttttgtttgttcctgcatttttgtaaacaagaataaatctgggcccaacattttgaaggtatgttggtgacaccattcttccactgggtaccctgtctatgtactagaggtggtctctccagtttccatgtccccactgttgggcatttcggctaaagtcatctccatcaagttctgggaacctctcacatcccaggtctctggaactttctagaggttccccctcctcccactccacacagctgcatatttccatttattcttctagtcccccgggccaatcttttgtctccccctcccctagaatttttttaatagtttgttcgtagaattaatatttaataaatcctggcggcagattcgatacctggatcaatggtttatgtatccgaatgaaagactcacacattgcctttatatttgaatatgcctaaactaactcaatagctggaccactgcctaacctccatgaggttaatctaccttctgacaataatcccaagtttttattactaagttttatattctattttggctgctctgggctccgctctcctggctccttcacgtggcagccatgcctctctgtactgcactcttcttaggcgtggcatcactcctctcctcgacactcccctggcatgaagggtctttctcccagaggactaatatataatgtcattaataccatcaaacttacaactgccttcattttgataattacaacaactcatgtcaattgaaaccatttcaaacagttattattccttgagataagttttctctatttctgtgcctttgtttcctacatttgagatcaaacgtcttggttagaatacattacttgccaaatatataaaataattgagaagagttaacaacttacatgtaaagtaaagcaattgatgaggtcaacttgtaagtgaacctgaattagttctgttgcattgagcactgtattttctaaaaaaagcaaagtcaaatgaaacaaaaacaaaactcccagtttttctttcactaagatcgatcatttgatgtgtgtcattataggtgactggcaaacacaactgtacatcactccaaaattatttgaatatatagcataggaggaaaagcaagcatttgaatgctaacgccccaccttgtgtccacctcaactggcagatttgagcttcctgaggggcaagtctgtcccttcctttcagtttcagggactcctggtgttggtgagcacagggtagccctctgagcactgtttagtgcttggtgacctgctgatgctgttcctaactgtgcttctccgagccacacgagtcccacggccacgtgtctcagtctagctttgtgcttagtgtctgtgcgtctggcactcttcccctccttgtgttagatacacctgttaaggagaagggtgaatgggttaaaactagaaacgacaatagaatcatgcggaaggcaagcatcaattgttacattagtttttacatagtgaaagttaaaactccttagaacagtgctgtcctgctgagaattaaatattattatcttgatttgtccatgagattgattagattttactactcttgcctttttatggtgaaattatattgatttagcaaaacctggctgcattctgtaatatctcgttacccaaatggtagtcctgcattatttcttcagtacaagcctatccccaaaataatttactgctaaaacatggttcatgctttaaaccacacagaaaatgcaaagctgttaagatgtcaggtaaatactcttttaagcgttaaataatttaggtaagtttatggtatacttattttctgtattggaggtaaatttttaaaaattaagaattctgcacattagagagaagaacagcagtctccaagcagtaattgtttgctcattgttctgtctgatgtaaggagaaataggggtttcaggtggaaggaagcctttgcccactggctgaaatttgttcctttaattcccgagtgttcttgcttctccgccatctctgtggaaccatttctgaatcatatgtcacccttccctgccttctcaaaattgcttatgcggctgagtgaaccaaaggtcacatgaagccactaaatgcaacacaacttatttctagaaacttaaactttgcaacaggatttaaggttgtatcgcaggaagagagaggggatgcaaatttaaattaaaatcatacatatacttgcatcaagttgtgaaattcacacaagtgtttaaggtaaaatgtaaaacttcaaagaaatttagagattaaagtggctattcaccagccaggaactggtgaccctcctactagaggccctgcaaggagagtcagtgtcacattgcatgcttagcagagtttattactttaatagagatgtgccctgggttagagctgcatgtgacacactctgtagtactgtaaagtagcccttctggcaattttgttgtttagttccctgacagacggtaaagtacagtcagccatccctgtaactgtgctccgtgtataagtttatcgcctgctcagcgttttccttatgtctgctaggtggtatctgagaagtcccagagcagagccccagtggaacatagatattgactgtgttggcttggataacgatggtccctataagtaggcatccgaagacagtggaacagtttgggaagtattaacaagtgtgaccttgtcacagacaagtatgtcactggggatgagctttcagggttcaaaaggccacatcatctccagtgtctgtcagtctcccccgctcaacccctgtgtgtgtgtgtgtgtgtgtgtgtgtgtgtgtgtgtgtgtgtgtgtgtgagagagagagagacagagagagacagacaaacagacagatagacagacagacagacaggtaaatagatgatagatagatagatagatagatagatagatagatagatagatagagagagagaaagagagaaagagagaaagagagaaagagagaaagagagaaagagagaaagaaagaaagaaagaaagaaagaaagaaagaaagaaagaaagaaagaaagaaagaaagacagacttttgtctgtttttctccatcttttgcttctggatcaaaatgtaagctcttagctactactccagtgccatacctgcctgcctgcctgcctgcttgcctgcctgctgccatgatggtcatggaccatctgaaactatgagtcccaaattaaataccttctttctataaggtcatcgtgttttaagatagcagtagaacagtatctaagaaaccagcctaccttctctccacagtggactaactatgtcttagtgaggcagcaggatggccacactacttctctcagagaatgccaagaaatgcttaccacatgtttcattttcagtttcttcccagtgtctcaatttgaatttctttcaaatgcttacaggttgaggcttctgggagcttggctgtggagaaatatgctgcattggttctataccatgtgcttcatataaccttttgcttattactgaaatggggcagtgctagagataaggaagaatagagaacattaactgtctgtgcctaaccataaactgtgtgaaaatgtttgagtgtgaactaaacattgtcattgtgtgtaacttctgaataatactttatactagctattttaaatacttttaatttctgatgtgcccacaacttaatacaataaatgaagaccaagataatagttggaagcaaagaaaatagacttaaaatattttcttctattttatgtggttaaaaaattacctctattcattaatcctcaggcatttagagaggaatattgactctctgaatccttcccatcatgcttattataatacaagcatctcccttgttcaaatatgaaattcattaagtagagatcttgctcgaagtatcataaggcgactttgattatctctgtattgttagaactctcattagttattgggagcttttctcctgctccatttttataataacctgcctagacttagagctccttagcagatgtctcgccatttccataataatggatctcattaaagcgtcttctaaagtcgttctttaaaggtgtggagaaagggaaaagtgactccagtgggtgagccccccacccccaatggttagcaattgctgagcaagaggcagtgaagtttaaatgctttgcctcttcggcttgttccgtgaagattttctgttaaagtcacagatgtggatcctgccgtctgtatggcggtcactaacattgtgtcttacgtagtaaaacacattgcacattttgtcagagaagtaaatgagtaagggggattggtaggcataagcacatgaaactgtggttctgatatttctagagtctccaaatccctgcccgtggaagatgtaaacttaggagatgaggttagacacataggctgatgaggtaatctggagacagaaatcaaggcctgtggattctgaccagagctgaaaggaaaagatcgggttctgagggtactaacggtggcagagacccaaaatcaagattaacaaatgatttgttactcatttccctaaactggaaagaatggcccgttctccccagtgtgaatggtttgaatgttatatcataaattctttgtattaatgccacacataatagttaatttctcagtaagtctgtctgtcacttattctgtaatggaaaatctgtatggtcttttctttaaagtctaatgttaaggctacattataatacagacagacaatgagcccagaacaagtcctcacagcagggtaatgattgttaaatgccagggtatctattcaaagcaccttgagaactgcgttctgggatcatatttaatggtggttagattctcttggtatagtgctaagcagtgtagagcagattcaaaactgcatttttggtaagtaacaagcatcaatagcaatttgtaggaattaatttaaagtttacatagtgaaagtatatattatttgcattagagagctaataagtgaaacaaattgaaaaacatgtgtggaaattggcaccatgtccagggaaacattatcagttacaaagaatgtgccaatatgcatacttctaaactttgcacattataatttggggtttctgacttttaaactctgccttagaaaaacatgatcatagaaaagtcacttctaaatttggtttcgtattgatcactgttagtacaagaaaacaatccaccaagtgtttctgttttaatatgtttgtaatagaagacttctattcttaatatttatgctgatttcagtactttaagcgatattagcggttttttgctgtgatggtgaaattgcacataagcagtgggagaagatgcttctcttacgtaccactgcaaattctttttctccctatttatttttaattagcacagttctttcatactgtcataagtatgacaactttggtttgcacatgaatttctagctgtctaaccccagggtgtcaccagtttctgacatctcacttggcgggcagtatgtagctctccgctttactaagtccttgtgaggacatttcagacagtagctatcctatgtcctgtcctgtgggatactagcactcacctgcactgttaggttcattttcatactcattaccaaacacccatctatcccagtcctaccctctggtgctcactgtttctgctgtcctgtgagtgggcttttttttcactttcacatagagaatgcacagcatctgccttttagtatctgccttagcccataggaccctctatgcatgtcaccacagatatccctgaataatactccacattctttatccattggtagacacagtgattccatatcttggctgctgtgaatagtgctgttgtacgtaagaggaatacaagacaactcttacacataatggcatcatatctttggatgcttacctagtggccgctcagatgattttttttttaaaaaaggatttacaagggggaatgtcattcaccatcccctaagtgtagcttgagcagtgactcccagagaggacgaagaccgtgacgcagcatagaaccttgacttctgcagcacatgcccgggccctctgagatttgcatagctgcttctgatgaaaagcatttagcttcaggacttcctttccatatggaagtttaaggaaaaaatatacttggttgaactgtgtgtgttttacatgtctccttgttttaaggctgatctccgttcctagttttccctgagcaacatgtggaataaatgcacagtgtgtagaatctgtttacaggtgtgagagaaacccttcagtttgttcccttggttatcctcccctcaaggaccccactgagatctcccgatctgtcattcatcatttactttaacaagtatgcagctggccttcactgtcctcctcagcaaggacaggctgttcttccctttgcacacaggtacccagcatcctctctgcttctctcctagtgcacggacaggcagaactcaccagtcacatcgccaggctcctcaccccttgcccagagaagaaagcctcagccagaccctctccagatcccccacctcagcctgccaccagtgcctccccgcctagatctcattcagaaaggcatcgtgcgctctccgtgtggcagccccacaggctcgccaaaggtgagtcagcgcctccctcgggaacacagcaggcagttctctgggctttctgtgtacctatatattacttaggcttgtttataacaacagtggtaagtttctcattttatttataccaagcctgctgtcatatcccttgctttattgctataaaattactatgaaagttatataattactcagagcctgtctatagaccccagatttgcttaagtaaatagcagtgtaaggtataatatctataaaatgcatttaaaaggtcatcatatgcattacaataatttgcgtgctgttattatcaaatggtattttacacttactttcataatgtcataacaagaaaaatgccaggggagtgtattggcataagggcttgaggtgtgatacattatcacccatgctgcaggttactcagaggacggatcatacagactgcgcttcaacccaggaaattaattacaacaaattacaatgtttgcaaagtcattattttactgtttaatattaaaggcataattttaacttaagcctacggttcattgtagttttatgcgggattctttgaaattttaatgataaagagcatgtattttattaatgtaaattcataaaacctttaatacgatttgctaatggacttatagtctaggattgccaaagagtacagcacatttagcgcagttttcttctcttacgctgtctcgaacttggcttctatcccatgactcctggctagggtagaactttgaattatatagacatgcagcaaattcttgttccttgacatttcctaatgtaaaaacataaactatttattaaataaacttttaaataaacactaaaacctcttgaggggcgtgcagagtccccttgggaggattcctcttccgccatttgtcccctggcagttaagactggcaggtgttcttcttttcattttaagaacccagaaagtcatgagtctgtcagcaactgctctgccatttagatcttcactgttctaggaatgctgttcaaactgccaaagcgaagggcccacccatatggctgccattgtactataaagaggaaaacagagaagaatcttaagactctaaatattgcaaataatttctgttttcaaaagtgaagaagcaataaaaactgtgtttctgaatctttgtgtctctggaatcacaggagtttacaaattcattgataattgccatgataatataattaatatataattgtaactttctatttcttttctgtatgatttctagaactcttacatgtatatcgtcatttgtttaaaattgttagtgtggaacattgatgtaagtttttcattaattttcagatttttcattagtagtaaaagaaacataaaaggttattagaaatgtaataatactgcattgtggctaaaatggaaatcgagtaatctgtgtctgaaggtcttttcaatgcatggtacaaacaacgtgctctcttggatttgtgttttgtcccctctctcttttagtcttctccatgcatggttagaaaacaagacaaaccactcccggcaccccctcctcccttgagagatccacctcctccaccagagaggcctccccccatcccacctgacaatagactgagcagacacttccaccatggagagagtgtgccttcccgggaccagcccatgcccctcgaagcctggtgccctcgggatgccttcgggactaaccaggtgatgggatgtcgcatcctcggggatggctctccaaagcctggcgtcaccgcaaactccagcttaaatgggaggcacagtagaatgggctccgagcaggttcttatgaggaaacacagacgccatgatttgccttcagaaggagccaaggtaagaaaatgtgcaatacagaagctggagaagcagccttcgagctttccctgggaggctttctgctggggctgagataccggacagtgtttaggtcggttgtttgtacctggatggcacagtacttcctccgtgctctttaactagctccatgttctggacagtgaggagctcacttaacgttgaacacgagggaagggaggaaaagactgtccctgtataataacgagatgcagacacaggacagctggacagagataggtccacttcctcactgttttgctgagagcctcccccatgcataactcggtgttattgaagggactaggtcttcttgctcagtcagaatcgggaatgttgaatcactgcacgtatcataaaccagtcttctgatccagtccagagtcggacctcgcaccttataaaacatgacccaattcactcctgtttgccaatcaaactattccttataatgacattcccacactcatttaaacaggaaccctctctcccctacatttagggacgaatctaagagtgcaggcatctgaagaggcagcaccagcagccattgagactagaacactgagtggtctccccagaaagcatcctgaaattctttctggtgctttattctggtgttagctgtgagatcagatctgtgtcctctccctctgtactgaaaagaatttcacctctttagctcagattcagttggccccagctttttattggctttgttaggaggtgtaatctagtactttaaaactctggattgtatttaatgtgttcatctgacatttagaaaacagcttattggcacacaggtgtaatcccaatggggatgagaagtttaaggttactctggggaactcaaggccgacagggcaacgtgagaccctgtgtcacatgaaggaaggggaacagatacaaagaaactatgcagtgccatgtacttacgtgtgtgtgtttgtgtgtgtctctgtgtccgtgtgtctgtgtgtgcgtgcacttgcatgtttgtatacaaacaccgtgatggtgaaaactttgcttcctaacatcactcctacagtggtctatcaggtatcctgtggtgaaaagagccagctctcacaggcatcatactaaagccgagagcattagttgcgaaccacagttgccagtgagctgccatagcatggttttcaattctttaaggttaattcactacagtgtgagtgtaaggagaatgcatatagaaaaaaacagtttggtaatgtcctctagacgttaagagcctgtcctcagaggacttcccacagcctggagtcccagctggagagaatttctgggatttggtttagtttgtgtttctcctttagtctctgttggctcatttgtgcatggtgacgcttgtcatgggaagagccttgaaacaagctctcatgtgaagagacatttatcctcagggtgcaggttacaagttatttctgaatgacttcagaaatacatagtgtagttgacaccacggccagttctttgaaggccccctctttcagggttcttttggatgttgccataaatgtaaacacaaagctggccttccagagcaaggctgttaactttttcagatgttataatctgaaaagtgggatgaagacttcctttgggtatggatttatattctgtaatattaacactagttctcatatagtagtaaagggttcagttttggttctgttgaggattccaactacaaaagttacctcttactgagaggtggattttcatcctatttctaatcaacctcttggatagtccctggacttggattcaaactcttccctaattttttatttttgtctcatgattgaattctccttcagaggaggcctcttttttttatttgtttatttttttaattaggtatttatttgatttacgtttccaatgttatcccaaaagtccccccacgcccccccccacccagtctcctacccacccactcccaattcttggccctggcattcccctgtactgatgcatataaagtttgcacgaccaatgggcttctctttccagtgatggctgactaggccatcttctgatacatatgcagctagagacacgagctctgggggggtactggttagttcatattgttgttccacttagagggttgcagatccctttagctccttgggtactttctctagctcctccattggggtccctgtgatccatccagtagctgactgtgcgaatgcacttctgtgtttgctaggccctggcatagtctcacaagagacagctacatctgggtccgttcagcaaaatcttgctagtgtatgtaatggtgacagcgtttggaagctgattatgggatggatccccggatatggcagtttctatatggtccatcttttcgtctcagctccaaactttgtctctgtaacttcttccatgggtgttttgttcccaattctaagaatgagcaaagtgtccacactttggtcttcattcttcttgagtttcctgtattttgcaatttgtttcttatatgttgggtattctaagtttctggactaatatccacttatcagtgagtacatattgtgtgagctcttttgtgattatatagctgagtagtactccattgtataaatgtgccacattttttgtatccattcatctgttgagggacatctgggttctttccagcttctggctattataaatatggctgctatgaacatagtggagcatgtgtccttcttatcggttggaacatcttctggatatattcccaggagaggtattgcgggatcctctggtagtactatgtccaattttctgaggaaccaccagactgatttccagagtggttgtacaagcttgcaatcccaccaatggaggagtgttcctctttctccacatccttgccagcatctgctgtcacctgaatttttgatcttagccattcagactggtgtgaggtggaatcttagggttgttttgatttgcatttccctgatgattaaggatgttgaacattttttcaggtgcttctcagccattcggtattcctcaggtgagaattctttgtttagctctgagccccattttttaatggggttatttgattttctggagcccaccttcttgagttctttatatatattggatattagtcccctatctgatttaggatggaggaggcctcctaagaggacagactctttaaggtctgtgctccattgtgtgtattagcgtggctgtgcttacatcctcaaagattatttcatgttgcaacaaaactgctgtttgaacccacactttgcaataaatattttaaaatatgatacaaagttaaagttgttaattctgggcatcaacaatgttcccttgagagtctgaggatccagctgattcttagtgacaaacactgtctttaacttatcatctgcctggcgaggacattacagatgaccttatgtagaacaatcttttgaaggaatctctagataagattgccctatgatcttcttcttgtgattataactttttgtgtgaggaagcacatgttcatgcatatgatattaaacttatctgtaagttccaagatttgcaagagctggctttcaaaatgggagcctttgtgcacacgggcctcatttgcagtgtcctactgaacaacacatgaagacatgctctctagattgtggagcagttataatcacaagatagaaaatacatttgcatttgataataaataaaatctaggcacccatgatgtgtgtgtctgtctgtgtgtatgtacatgtctgcgtgtgtgtgtgggggggtgtgggtgtgtgtgtgtgtgtattacttacacatatcaaataaatgcaaacagataaacatgtttttagaataaaaatccttttcattgtacagaatttttcctaaaatatcactctaaccttagacaatatagtcgaagtcacaggaaaagattccgaacatacgtgttaagactatatggcacctagaggcacacagaaaaaccaatgtaggagagccaggtttacaatagattgcacagcccacattggagggcttccacaccgcagacccttcaggaatggggctcatttcgtcatcctcactcagctgtgcaagtagttggatgtctgtgacacagtgagaatattgtgaatggaacaatcttaagcacaggacagtccagggcccacaagagtgctctctgatgtgtgacaaacacccaaaatatatgtagttgaaaggaaaagaagttgaaatcctgaaaggaaaggcagaaaaggaataaagtgttctacaagctggtctctaccagctgggctaacagagatggcagacaacggggtagccctccccagccctgccaccggacctccatggcaataacagaaagggatttcaagtagataggaagcaggacagtgaaatgaagtcaagggaaggaattgcagtgcatataaggataaaggcatgtgcccccaaactgggtaatacaatttgaaaccagttctggtatgacgttttctcagtcctttatgtaggaaagagctttcaaagtagagatagcacgagactaacgtgaccagcgatgcggatttttaaatggtaaatccctaagatttctggtagaattctaatggataggtgacagccttgaaggagcctgagcccagaggccagcatcttgcagactgttgtttccactattcacaaacaggtcctccagattcctaaggaacatagaatattcattttcagctaggagatggtcgtgtactccactctccactctcgggtagtgacagccaaattctgctttgatgaaatgggtgaagttgaacgtggaattcagaatcacatgttagattttgtcctccaacaactccttttcagaaacaatcatattagattcacagaaatgagtctcagcacttgtaagcctttgactgtttgcatgcttgcataatttcggtctcctaattaggaagaactacacagaatttcatgtgtggtattaagaatatgctcaactctcaagacacagtttagaactgattacagcatgatcaaatactaagcaaatgatgtgtacttttaaaataatataaagacaaggtgtcttccatttatagcaatgaaatttccctggtcagtgcctccactactgaggtcacctgccctgttgtctctcaacattcatgtaagccctattgcacatgacccatgtaagggaatttgctataaaaacaagtgagaaataaaagactgtagtctgaaatacatacaatattgcattaattctccacaaaatagaactacacttgcagctatcaaataaattgttcattaaaaacaaaacaaaaaatgaaaaaaattcttaacttttcagagacaggagaaatctttaagctacagtccatcaatacaattcatgaagccattagttaaaatgctactcacattttgaaacatactaatctgatgaagttagaaaggagttgcttaatcccctcaagttaatgccctaccagagaatgaatgaacctgagtaatagattttatgatttttccaggaaaaacaggaaaaactctgttgtcagtatgatatcactttatttttttattttactgtgtgtatgtatgtgttgtgtatgtatatgagtattcttttatatatacatattatatgcacatgcatatggatgctcatgtccacatccatcttcctttgtcatttactcacctgacgttttgattgattgattgtttgattgactgattgataggtttatgcgtgttttacctgaatatatgtctgtataccatgtacttgccagatcccctgaaagtggagttcaagacaattgtgaggctttgtgtgggtgctgggtatcacatctgtgttctctagaagaacagaaagtgctcttaaacaccgagccatatcaaatgcttctgtcaaatgcttttctaggctgggaatgtccagtaagctcttgtgatctgtcagcacagtgctgggattccagatgcacacagctgtgcctggctatgatgtgggtgctgggaatatgaacataggtcctctttcccgtgcagcaggcactctagcagctgagccgttttttgcaacagatttccctttgagaaatttagtatcacacagagatgttgtgtgaattgtcctatcaaagtatcgctcctttatcaaggttgaaacatgcttttatttccatatcagtagatgtttgggtatattgacattcctgctcaagtgtgctcataatgttttgattatgaaattatagttggcttattgttgaagttgataccatgaactcttatttccatatcatcctttgttactgagctcttatcaagtagtaacgtgatagatattattaccgaaaaaacagcttagtccacatttttaaaaagaaatcctttcattttacacaacttttaagtgtaattttgataaaaatcattagattttattgcaaaaatcttagcactatgtctgctcagtcaatgagaagaattttgatgaagaatactttcaaatgttcaacactataattggcatttatagctggatgcatgtattcatcagataaaagacaatttttatgttaaaggatttcattgaacctcatcatgatacatatctcttaggaaaattctcttctctagcaaagttcaaaaaattttgtcatgttctgatacatggttctcagtcaaaagcccacgataaaatcacttcatttaaagatgtgttttatcaggatgtaactgcagcgcgttgaatctaatgaggggagacttgggaaagaaaatctgaactaacatagtcactcgcttctagagtgaaatttcaatgctataaaattggattttttacagcagatgagagcatccatatatctcagaggtgatcttgcagtctgctgtttggtaggatacccatggcctttgcaggttttcattttaaatcctcaccactgtttatataaccaagaatctaagcagtggatctggatttatttagccaaggtacaaaaggtacaactcacccatcagggctcatttagccaagactactaaaaatatatctcaaccatctgggctcatttagccaagactactgaaggtacaactcacccatctatccctagtattcatctcccttctcaatatgagttaataagagcttatgaaagaaagaagtttattataaaaaataccaattcaattcattacttacaaactttaagaggtccatagccttgtatgcctttgcaaagttacccttccatttcttccaccatttaagttgatccagttcaagactataagagaggcaaggaacagttggccaggtgcttccaccagcattaccactgcgcctgtaaaccggaagcccctgatccccactgataaaacgttggctctgagctttttgcaaaccaaaagtagatgtgggatttccacacacgtggaaagtcagaacaattggctgactaaaatggctctgaagcttggcttggacatgacacaggcctgcaggggtctactcataccctgtgacatcaggaattgaagatggccctgggagccctaagtctgtttggaggcatgtaaaatgacagttgtgtccacatagtttcttcctctagccagcccctattcttgtgatataatctgatcgttcctgggaaattctcaattggatgtatataaattattgccttgcttctccgttgtgtttaaaaatcataatgtaacatcttttcatataatctgtgatatggtagatcaccactgatcctgctgactcctgaataaattgtatggtattgcactagtctaaataagccaaaattatatgagctctgtgaaattctaagagctgctgtggtttcaggctttgccaggagttgaagtccaggaactaacacctttggtttactttcaggtcttttccaatggccaccttgccactgaagaatacgatgtccctcctcggctttcccctccgcctccagtcaccacccttctcccaagcataaagtgagtttccttggatttggagatcgtgtgtccatacctaatataggaaagaatgtttttcaggttcttagtacagcaactacagggtaaatagaaggaaatcagtaaagacagaagcggtggaattgggtttatgacttcaagtatcagatggtaagacttctgcttctgggagtagctcctacagacttcctaaactcctgagaagatgaataacagaacgaaagggcaagaaaacttagcctaacctccatcgaagcagagggcagagcagcacagcaagctctctactccagccttcttctttatgactttatctcactacccaagttcaataaagttcccccaagttccctgcttttcaaaactcttcagtgcccaagatctgtgcatgtatccccatggagttttttcctatccagttaagcctccccttgctggctcagactcagctagacttctgagaatgtcagtagatctgcattgagttgggaccagtggacataaagctgggaattggggccactgcatgctggacagtgaggtaatgtccagccaagttgccactccttccatttccatttccttctgagctctctgtagcagtatgagcctacagaagtttagtcagctagaattctcatctattcctagtgcttgcactatgcagcaaccaagccccgcctatcatgttccaccttttcctcaagttctatgtctcagcgtttgcttttataaaaactaatgtgacttgtgttcaataattaatagtggttgacaaagcagagattggcagtatatatacctataatcccagcattgggaagctgagaccaggaggatcatcattaattagagtctaccttcagaaggatataatgagtgccagggcagcctgcgatccagagtgagcctctgtatcagaaaacaatagaaaagactgacttgcatttttcttgttacaaattattgttcttgatgtaagtaattatgtactctaattttaaaaagattggatggtttgcaaatcataaacaaggtttatgctttcaaatactgccagggaaaattattttaaggggtgtgttgttgtttttgttgtttttgatggcttggtttctatctactaagactgccaggtttttcttttttcttctctgtttttaatttgtttctttttctttctctttttttctctgggagtcctatacatgctcagacagcgctctctctcaggtgcatcactaactatgcaaaggccttcttttataacgaaaagcctccttagaacttcttcattcctttccctggaggtccttgagtttccattagatttataaaagaaagaaagaaagaaagaaagaaagaaagaaagaaagaaagaaagaaagaaagaaagaaagaaagaaagaaagggaaagaaaaagctaactctcaaccttccaggaatctgatatgctctaaaagtaatcttttaacatgtgtgacatcacaagagaacactgcaccaaacggtgtactgctcattgactagggtttttggtttttttgtttgtttgtttgattggtttgttttggtttggtttttggtttttggttttttgtttttttgtttttttttttttttttttttttcgtcctttaaggaaagccattacaaactgcatcagcaaagtgtgtttcatagtcgggacagaaggagtcactgaagatgggcacaattagatactgcagtgcctgaaattaaaccagagtgcaatttgagatccttgagggaagagtagagaagctgagctgagacccagcagttacaatcacgctgtcatacagtctaagtctgtgagagcaaacctgatagtgcaggccttgcaaataaaccttaaagtgtgcgcatacagtaagacatcgccgctctataacctctacagtcagggttttaagaaacaaattactgagatggtccaagttcctgatcagctcccccagccctctgtttctttaattcacagagtgaagtatgactagagaaggggtcttggttttgtttgtttctatttggtccttttataattagcatgaatggtaaattcctagtgaagtgcactcactggtaagtttgtaatgtttaactctgcaagaaccactaagatcgggtgatattttctctccactttctaatttttttctcaatattttctagtttatactaaaaaatattttaacaagcatttaacaagtatttttatcagcaacttagttaatttgcatgttacatattagccatagctgtaagcattagatttgtattgtatgtttctcttcccctccccacaactatatctgtagaaattaagtaaagtatataagaaaatataataaaagaaaaggaagaatgaataaaagaaaatatataaaataaaataatcctaacagcagaaataaatactcaaaatatcaacatccaaattttatccttgggtcttttgtgaaattgagatttattttaacattatttagttcatttgtggagatgacatcacactctccttgtcctttgatattgtcacatccatttttttttcagaatatatatactgttttttctgtgaaatcatgaaattctgaagtaaaatctgcagtagagtaaaatcatgttgggttccatgtcttaccctagcatttattaattgccctattttgaagaaggttccctctctggacttttggcttctatctggctaatacatgagaggatatgtttaacttaaatgttacctaaaatcttttgagcttctgctccctatgcagcaattgttatgaattattcactatatggtgctaattttattggaaactttggtgacctgaatgctctctactatagctggttgaccacttcctattgcagaagccatcatgagatgaactatcgaccttactaacattactaatatcataatgcgtataatactttcattataatcattatattgttcatattattattatagtatctgatagaatgttggttatgaaattgtactactacataatatccatgcaatttattattaatacagctccactttgacccaatggagaggatagtccatgtccaaggagcatccatcataggaggatgacagagcaaacacatatgctcactgacatggcgctgttagacattcaggtccccattgccatcttagattcttggtccgtgttcagacatcaaggcaaaggaaaattacaaatcactgtctaaattaacttacagttcttacaaatgttggaagtcacagagctgcacataagaataccaggctagcaattatcttttagtttcaactccagtgatagtaacagttaggaagatatgaattttcggcatttgatactggcccttgatgcctattttcttgagggcagaggatatcctgtgaggtttccattcaggccagtcttcatctgggtgattatgtgactctttctacacactttataatttatttctgaaaatatggtatcataaagtgatagtgaaaagaaacagtcgctgtttgaatagatactccattttctgaattttttaaaaaatagattctacataacattggcactatcaatataaagctttaagtaaaaacttgaaatgtagatatttattataactttttagaagagagaacaaaaagttccttgtgtattattttattttataattaaattataatgtataatatgtactttacatatatatgtagtattttattacatatatgcttactaaattatatccaactaatttgatttttaagtttaatgagatggaagactaaacaattgaaatgtttattgtccttggcacactatactatcaaatgaacacatatgatattatagataataaggtagtgaatccatccaagtaaaacaacactgtagaaagctgaggaataatttctttatgctttgctgtttacatggggacaattgtagttttggcatattaatcacaagctgtcgaataccttggaaccaaagctacttggttcatgcttttcctaacggtcctctgtcgtgggaggtggtgacgtttgttgttgttgttacacatctcttaattaaataaggtactaaatttgggaggttcgctgaaaagaaaatccaatttttgcccagctctctagtttttgttctgttgctgtgctcagctgagacttgcggggggccagatggggcaagatccaactcccttccccttcggaatgggtgctctagttaaggaaaagaaagtgagaagaaagtcagttaaccacttagcggtaatctccggtaggaaaatcagacgtggggcaggatgactagtgacacacagactgtcactctagatgtggtcctgaggaaagacctctctgaaaggcgcttttaaagcagtaaagcaagggagagagcccagctgtgcgtgaaaagcctgaccctggggcaccggggtgcagctgtcctagctgtctccaggttttcagcaaatctgtgagatcgctcgcagtcaaagcttagtccaaagctgcaggctgcagcaagctcaccttttcctgatagtgtgaaaagcaccctctcaatcattgtaatactcatgccagggttttgggcaaatgacttgtgtgctgcagacacaagataatcttgtcgaacatcactgtttgttttgctggctctttgggctttggtttgtctgaattggagatgttttctgttcaggtaagaacagtgtagcacatgaaacatgaaataaaacatggcagcttgagcttttatttaataaaaacatgtatatctttactttctgccattagttgcttgaacagagatcttctgatatgggaagcaagtaaaatggcatattatttaaaatgcttttctgtccatgaaaggttctgaaaattgttgctctctctccttttttatcggcatggtgattttccttgctaataccccctcattatttttatttaaaagcttgtaagtgctcagttacgtgcaaagtagggtaatccttgatggcctcaaggtcttcccttaaacatgttgcaattgtagacaaaaacagtaaaataacagtataggaaacacatcaatagaaggacatatgctaaatacatataaccgaaaaggtcaaagaaaattactgaatttgttgccagtttcatggggatttttatagacactgaaatatgaaggggtctgctttttgttttcggagaaaagttggtgtgtcaagggttgctccaattaggaatgaaaaccacttgaagagggtgatatttgaggtccattatcaaagtaaatggtaatggcatgtgcagtcagtctgccctgtggttattctgggagtaggcagttcttgggaggaatatgtttgtgaaccttcagctttgaaaggtggcctcagaaagtatcaccgtgatggaaatagacctctttctcaacatggcgaatgtgcctgcacactcaagccagtgagtcaccatgaggataggaaggctcagatgagtttcaagttaaggggataatggttttgcaacctggaaaaatgtacctcctgtgctatgactcaggaacagcagcagaatggaagaggtagcaggaatgtggagtcatataacagtgtaaatgtgtgtaaatggatgcaaatggcttggtatctttcctttggagccagccagatagctgtcctactttgttcctccgggaccctggaggaacacaatgaaaataatatctttcccttaagatataccagtgactgactgagtctccatgtccctaagtccaccatctagataacatacacacagacagtgactctgtgtctagttatgctgacacctgttgactcataggctatacaaaagtttggatacaatgcatagactttgggtcagcttgatctctctgacttttttatttacaagttctttatgataaaattttaataaatattaaaacattaacctaagagaaaatagtgaactttcttacaagactttattaaaatgataagtagaaaataccaggatgggctggtgagatggctcagtgggtaagagcacccgactgctcttccaaaggtccagagttcaaatcccagcaaccacatggtggctcacaaccatccgtaacgagatctgactccctcttctggagtgtctgaagatggctgcagtgtacttaaatataatcaataaataaatctttaaaaaaaataccaggatgtattttttatatttcaatacaaatggcacatagctttcttaacttctagttataactcaccaagatccattcaacctaataaaatgtctaactagtagcttctaaaactgaacccttagtttttgataaaatgatagataattattgcctttcatatttacatcagatgctctctgactaacaaaagagtgagtggtatttagccaggcaagatcttctgtcaatgaagggtagcatccagagctaaccacaacaggtgtggtttgtttgtttttttttttaattgtttatttcttgcactgacaagatggtttcttgctacaaggtctgatcacctgagttgaatccctgggaacggcaagataggagagagtaagaactgattgccacaagttgtccttgacctccatccataccttggcatgagcacacacatcccaatacatactatatgttatgcaaattaaaaacaagtattcttccttcagagtgaagtgcttcttggaaatcattaaattattgaagtaacctgtaagacagatttgaacttccacctcttgatgtagttattgaatattaagtcaaaggtcccttttgtctctgaagtatttacttaagtggtatgtatagagatggtgttcactgagactggaagcagagcaggatgaggatgggaacatgcagggcccacttcctctgcctatagagacgtcctggtctttgcagaggttggtgagattgatgtctgtctccaagaatttagtgtttgcaagaaaatacagttatttctatcctaaccatattaaaacaccatcaagtcatcattttgaaacatctttacttttgtcacctttagttgcaaggtgtgtcttctaggattcaactagagtgactataacactattgtttgtttatgaatttcatagcctgtgttctgggctgtgtagagacccctctgctactacaacaaagcttcaggttaccattaactgacatttggatcctgaagtatctcttaacaaacagagctttaaaaatcaatactgaaaacttcttcaaagacaaactaaaagtataagcttttgaaaactcccaagggaaggttttccgtgatctctgaatacagttgaaactttaaatatgagcacacacatacatgcacacacacacacacacacacacacacacacacacacacacacacacacatacaaaacacctctgacatttttttctattataacgggtgttcagccacactgacccaaaagtgaaatcattatagaaagttctccaaaatccaaagcttttttgaggattacatgagggatacgactggtaaagtctgcaactgttccaaaatttgaggggaaaaaataatctgaaaaaatgttttagtcccaagaagttcagacagggacactcagctctcggagagaagaatacaaaatgaaaatgaaactttgtggtgagaagaaatgaaaatggaaaaagaaaaaagacaaaaagccacataggcatcgactgcctcacgtaccagagggctcctgctccctctgccgaatgtgctggaacattacactgttttgtgttttttttttttttttgggggggggggaacattttccgtgaagtttataataattaaagtggcttggatccgagtttttctagtgtcttgcaaactagctgtctttctacctgttggccaagttgcattttaacatttttttttttggactgttgtcttgggcagtagcaaaggttaaattaaaacccacacaggaagtagagtacttttcaattttattttatatattttcccaaatgatcaagtaaaatgctcaaatccaccacggtatcccgctaagtgttttattcgttgcagttaggtattacacttaggtatcatgagttacaaaaacaatccatctcaaagatttatttctgtcatgatcggcttctaattgtggacacgtttcgttcttaattgttgcagtgggaggaactctagcactacagttataagttgacaagatagttaaatttctctcatgtatggcttttttaaaactatgggtattagccatagaccagtttgaacctttaaagaacctcttgtttccagttgatttcagtgtatccttatcacttttgctgatttccagtacatgggagggagcaattaacattttaatagcttggacttgaataattgtacacatcttatgttaaagctttatttataaaaccctttcattttcgtaattttcatttttttcttagttcacccttaaaaaccacaggtatgaatatcttatcttaacatttcaaggccttccatttctattggatgtaagaacagtttacagttgaaaacttccagtgacaaagcagtttcttcattgttctatgtcacatcagaccttcctgctctggtatttatgatgcttaaaccagattggattttcttttccctcttggtaggtgtactggtccattagcaaattgtctctcagagaaaactagagacacggtagaagatgatgacgatgaatacaagattccttcatcccatcctgtgtccctgaattcacaaccatctcattgccataatgtcaaagctcctgttcggtaagaagatgagcatctctgtatcatcctgcatcggcataagcatcgtcatgctgtcaaacgtgggggttgtttctatgcggttcaatagtatgtgattggttaaaaatcctgttccttgcctagcctgtagttcctatatatttccttcattgcttccacataaaagattttgttgccttcttccccacccccacaaaaggccaaattacaatctaataaaaaggagctatacgttacatataatgatgattaattcatgcatttcccctaagatattttaatgaatttcaaaaggtccaagcatatatatcatgaagaaatattagtgcttagaaactaatattaaggtactaggtcaacctgcttaagaatttttcttcataatgtgaaggctagaataatttatattcattttccttcttgatatgtaatatacttctactgaaatcataatacaatgggggggaagccttaacgttacttctgttaacttcttttttgagcaaataccttctcttgcatgagctaagaatacaaagatcactgggttttgttgttttattttgctgtgttttctttttctttttcccctcattataataggagcattattggtcttcaaagtgccagtcacattgacttttataagaattattgataatggcttacatgttttgaaatatgtttgtctctaagcaaaatcatggctttgcatgcatgaaacttaatacagttacagtaacatttatataatttgcatcttactgacatgtcaatctattagctttattttctgaacttattttctggcctgcattcttcttgcatagtattcctggagctgtgcttggctccaagttgctcagctctgttcagacactgttagtggctgagctgcctggggcctcctgatgactgacagataggagactgcaaggccatcagtcatccacgccatctttactcagtgtgctgcttccacttgaggccagctcagtcgacttaaagtattttatgagtagagtttccatctttggagttgaaaacgcttcccaggtgtctcacagaggtagagaaagaaattcttggaaaccaagagttgtgcctccaaagggatgctggtgggcggagttactacccaggctaagtgatgcactgcagcccacgctttccctgattacagcaagaaccagctatctcttgttaatcgtgctgatgagtgctcctgcaaagacgataacggagagtgttaccctgggagagccacgtgcccgctgagctagctgagggaaagtcacgcttgctcatcaagtataaactgtgaacaaatcccagtttctttggctcttactaatttagtatagtaatttttaaatgctaaaattgaacgagatttttttgggttctttgggattctcattcttctcatggctggaagactgaaggatatgattttaattcatcaaattttaattgtcatgtcacagtagatgatatttaagtggctaacctcttggatactgaaagtcaatttgaattataaccatcataaccaagtccccacagttatagagaaataataaatgttgctaattcctaagcttaattgtaatgaatacttgatctaatttgttcttgaaaaccagtgagtggagtggcacgttgtgtcatctgcaaagtccccccacccccccttagaacttccttttcctggatgtcactcactccccctttggaacagcaagaaaaataaattgtcagtatgtgggaagtgaaacagtaaatgaatcattcaattcatatcatcattatgaagactcaatacgtaactgttcttaaatgaaccatatcgtgcccgttaaaaagaaatggccaccagagagaatagaaatgaatttcagatgaatcactctctcaatatctactgaaatatcgactatctcctccattatgaatgtagtttcactttgctctaagaaatcagactaattcaaaaggaaagtataaaacttcactctctctctgaggctctttgttagccagccgttactaagctaggagcttaagggcaagtgtgttctgtgccgcctcccatgcctcagtttcatccagtcttgatggcagtaccaaaatcacggcttttaaatgagctactattttcccccatattaaaccatcttggtgatgtgcacccaaagcttttgctgacatcacttccctaaggtgtcagagggccagcgtttattaaacatagtggttagataggttcagaaggagtaggtcttggagtgttccctgcagaacttaaacgaaattgtccaatgcttcatagtggttcctctcttttaaggccctttgaatttcaattcaaagaatgcttaagttgaaccaacaaacacattcaatgccatcaacaaaaatggaggcccttagaccttacatagttttcggtagcgtatactccgtcacttcagaactctggccaggtgtaactaaaatcgtactcaaatgtgtttagggtttcggctgctttagtggccgtaaattgcagtgagagaaagagagagacatgtttcccttcagacgaacacgtctgattttaaagtacaggtcagggtagctgcatgttgttactagtcctttttctagagaagataattgtttttgttttgtattcttattaccttagtaggaatgaccgttcgctctattgtcctcccctcacgcccgccatgacacttaaatgattcttgccctctggtctccacattaggtcttgtgataatggtcattgtatattgaatggaactcatggtgcgccttcagagatgaagaaatcgaacatcccagatttaggcatctatttgaagggtatgtatggagtatgctttcctttgcaatatacatcttagtggcctcaacctaaagggagagttcccttgtgttttcatactgagaatgcattaaggttttgtgttatcctctaggaggtggttctgactcagcctctgatccagtaccgttaccacctgccaggcctccaccccgggacagcccaaagcacggctcttcagtcaacaggacgccctctgactatgatctgctcatccctccattaggttgaaacgttaaaagcagtttaaacaaccctgacctgctctccatatctgcattattcgaattaagagttcaatataatgcagactcttagttgagaattggcctaaacttagttgggttctctggttgatggtggctcctgcattcacatgacatcactctaacagatgaactaattgcataggaaatagctgggaaattttaagcgattttcatagcatctttcagagtttttaagtgtctgatttttctgcaataaggcgctgcttttataatcagagaaaaagtacttaactttgttttaagctacatttccacaatcttatccttacataactacaaaggagagcctggacgggcgggcgggcgggctggctgccgccagcagggatttcatcagttctctcatctagaggcagttctgtgtcaagacccaagagtgttgctcgctcccttggcctctgtccagaggctttcaagtgcggttctggagctttaaaccagggccctccaaatttactaatccttagtaaacatgacccacgctctgcttcagcatgaaattgctgggccctaacttatgagaaaggatatacttcatcctagaaaacacgaactagttctgtttaaactgtttataagcttttctgaattgtctgttaggctgctagaaatactaagtgagcttttatatttctcatatgcaccccagaccagtagtttgagctgtcctattacagtgtcttttgcttctgatttattgatcaaaggttttcgttttgttttgttctgtttctcctcttgtgcttgaattctacgttcctgtctacagtctggtttccttatttgctttttctctatactggatcttgacccctcactcaggcccttacgatctagatgacagtgtttaatagagtttgctgtagggctgtcagggacctatgtgtttgcttctggtctagttgatttttttttcttgtccaatataatagccatggatgattgatgacctttctgctagctattcccatagaagttacctcctacctcttctcttgggccttcctccagcgtggcctgcgtattggtccttccttactgttctcttggctaagcacaggcattacctgtctttcctgcacatgtatttttgaacctctgatgttccacttgatagcagcacttcactggatgctgcttgtatttttcttttctgctctcataaattctcctttatgaggccaattaaaccctttcacctgtcagtcttaagtgtttgcgaacaggttttcactccccttgatagtatttaagctccttaagttttgatcttcatatcactcaattcctagcatggtgcctgatacttaagggctggaaaaaagatttgaatttaattatgtgacagcaagagcctgaatgataacaaatctcttctaaatcttcaaatacttaaaattagaaaaatatttgtgatgattagatcaaatattctgcatatttttgcaaggcaagcacaatgataaattcatttttatgtatttatgtcaaattcattctgcttaaatacatgtgtatttttattattagaatgtgaaggtgtttacgtatagcctgtctcactgacagcatatttgatgtacatacttgcaaattatatgcagttcattttatttttttaaagattcaaggtaagaaaaaatctggtctagcaataagttgcagggataaatatatagacataaagtcacactgcagtattctataagcattgaataaaccacatatatattacatatacacatgtgggtaactagctttggagccacctaatggggatctccattgacgtgttcttctctggagatgacaactaagcaaacagtacactctgctgcacttgtgcgtttgctctatatttttacagtaaatcaaatgtgtggtgctatataactgaattacagtccagtggaacaagtgttatggagtggttagacacgctctttgacactaaattacctgtgcatggtgtgatttttctcaggagaggccatgaactctctttgttgctcagagatttcggtttggctggttttactgaaaatacttttcagttcagagttctagtatactaatagggtaaacgtgacaaagggacagtgagctgatatgttacttgcaatgctgctttttatagaaagacccaggaaacagaaaaatggtttcacagaggggtgtttcattggtgtgtgtgtgtgtgtgtgtgtgtgtgtgtgtgtgtgtgtgcgcgcgcgcgcgcgcgtgcgcataggtacattcgcatgcatgtgtgtgtttatatgcattttctatcctcacacccacaaagcaacaccattctgtaagtcagggaagtgctgaatccaccctgcaagtgaacttacttgtcaggtgaagcagtaagggaaaaatcagtcataatttttgcttggcactgtggtttgattaatgaagttccactgttaatagtgctccttcttgaaatgcaggtgaggacgcctttgatgctctccctccatccctccctcctcccccacctcctgcaagacacagtctcatcgaacattcaaaacctccaggctccagtagccggccttcctcagggcaggaccttttccttcttccttcaggtaggagtgagtgaaaagccaaagagggggacaggagggggggggggggacggggctggagagatggctcagtggttgagagcactgactgctctcagccagagctcctgaattcaatccccagaaactacactgtggctcataaccatctataatgagatctggtgccctcttctggtgtgcaggcatacatgcaggcagaacactgtatacataataaatacatctaaaaaaaaaaggcaaaagcagcattttcttttagagcaaagtacatctgagatcatgctctcaaatttatgttattgtttcctgagtctctgtcacattagcagaaagatttctggatagtgagagctgtgattgcctggtttgcttgacaccagatcgatttaatgaccaaacatcacaaagatggcagagcaataaggaatcacagtgcttgcacatgacccagtaaacaactccacacccaagtacatatgggcaataccgatggaatttagtgggttatttaatactgtttaaaaggagagatgtaaagtcagactggagatgtgttagtggagcagagttgaaggttgctaggttggaattggggttgagttgtatattgtacattgtgtacatatataaagttctgaagcaaaagaaagatcggaaggaccgagggagcatgctctgcatattatagagagcaagcgatgccttcagatgacagcagagttcctgaaagacatatgacagtgtgatgggccaataggagaagcacaatctttaggttctcaatcccctatttccagtgaaatgtttttctaataacggacttcaatattttttttcaaggtgtgctttaataccctggttttattcaaagcataaggttttatgtcctaacaaggtagctctcctaaatgtttgtgttaacaattttaagcatggagatatattgtcttcaacgggaaacaaatacagttttctattagtgcacatctgtagagtgtggagcagatataacaatgaagagactaaaggaaaccctctgcacatcttgggcagaattatcagaaaaaggaaacacagccacacatgacagcaggctattgctatcactgtctccagtctccccagtctgcctggggagaggtgtgtggtctgtgtgccttgcaaggctaccctcctggactagctttggtaaagcagtctaggtagacgtggagggacatggctgtaatcccagcagctgcaagtttgaggcacaggactgtgagtttgacgtcatcctgggctataccagatttgcctcaagaatagaaacaaatgtttttaatgttttctgcacatttccacataagataaatcatgggaaatcttttaagtgttctgattgttcattgcttcaccagtaactcattgaaagtctgtggagctgttaatttcccctccccatccctaccaccacgaccaatggctctgttttcatcctctctccttcgctctgcccccactgccccacccccactctgctttacactcttctctttctcacctggtttgataatgtagagacattggagagagttcatgaaacacaaactctggtcacctaacaacacatgtcactttgcgtttcaaggggctgaatatggaaagaataatttccagttgaggttttcaacagcagttgtcttgtctagtgtttggttcattattaacgcatccttccccccgtgctcatggtttgccagggtgagacctaaggccaagtgtcctaaggtcatctgctgcaagcaagagttaagacaagcatgcagccacaactcttgggtgctgagcttttggcagcttctggttagcatcctcctctagcttttgtaatgtactctcgatttaatacccgactggtgaagcctctgtacagtgggctcccttacaacaaagtcaaaatttctagaagctaccagaaaatattttgttacattttacaaaatgtgtgaccatttttctaaagaaatacagtggcacattgctagtggtaattcttcactcttaagagtaaaacttgatgaaagatatacttactaagtcacagtccagctcactgcttttacaattgtaaaactgaacaaaggtagctgcccaactcacactgcagcagctacgacggaagtctccctcatgcccagtgtttttaattaattagtggactcataaattattttgcagtgttgagatgagttccttgaaaagtatgccaacgtaagggcagaatagatatctcataaaaggctattgcattttctcagactattatataaaatccccatctctttctgatagccgtctacgccctgcacagctgagtcagggtgccagcctttccactgctccagagttcagctttcagactgcagagccgcctttctgcagagaagcctcatgagtccagccagctagcagaaggacagccatgcagagactcagctctgttcatcctttgtgtttcccaccttgggctttcacacaagatttcttttggcaaaattataattcccactaacgtgctcgagccttccttttggacgagccaatcaaaacttaacaaaaccggagtcctcaacaaaagctccatgatttcccgtccacaaacccaaggcaactgctggcataggtgcctttttctctttgtaacaaaaagagaaaaaggcagtctccctgtgtgtgggaaggttgaaataggcatttctacagttttgcttaaggcaaatagggcatgtgcttaagcaacaagagctaggaaagcactgagtcttagtcccaccctgcatggagtctttgggaaggacccaggatgcgccccaggcttcgcagccctacctcaccttcctctctttccctgtaacctaggatccccaatattaacatctcaattcaattttaagatctagtgacgttattaaaggtaagcagtactcttgactctgagacatgaatattcatctgtataagtaaaactcaaaggaaaaggatgcagtgggcatcatttattcaaccctattgagacatcatcaataacggggctaatcagagagctcgtgccatctgcaaggttgacagaggaatcacataagtgatgtcaactgcggtgtccttcccgtgtggaggctgccatgttcacatgtgagaagttcaagggcaagaactgggctcttgaaactctctctccagctcagcagcagcctctggggatttgctgtaagaagtcaggcaggacctgcctaggctgtaaattagaacgactacatttcttcttagcaaattgaacacattgtgtgtattacattctcgaaaaaaattatattactgtataattacacatgggctgtagcattttcaatttgtgtgttttaatcataaatatggacattggccttacttagttttaaacgaatttaattcagcaaagctttattgattttcaaatttcccttatcagaggacagctagtaattatagcactctgtagtaattattctatgtcacgccatcccctttggaacagtagctccaattccatggctctcaacagggagcatccttctccctgtcccttaccaggaacaacttggtctaaagcgaggtagagcatgtcatgatggaacagattctaagtgggtttgctgctgatttaaataatttattgtatccagtcccttcttaggtaaaatggtttaatgggaaaacatttttaaactgcaattgtttattttatttaatttgtttataatactaaaacatgtccagattttaatattctacgttttcagtttctctgtaaataatgtagaaatgtccagtaagcctgagttttctctagggtataatgatatagctaaactatatatacttatagcccatctttctttatggaaagtatgtgtttgcatggatttatttttagtagttacaatatttattaagagcaagttaattgccaaacagtttgcctgttgctgtatttaagttaagagatacagtataattaaggaaaattctgccctccaaggaactcagaataacttcagagatagtaccagcagaagaaaatagatgcagaaaacatgagagtggaggtgaaggctgtaaattattagcgagccgaagaagtcagagataatgttcttctattcagacaagagtacacactaaggctttaagcccatatactgctaattttaaagcggttaggcccctgtggtcctagtgacttctgacaacacagactcctgtctctgtttagttacatttggtgaactccatcacgtatagtgaaataagttttcagtctactattcacgcttcacagttttacatggcagagtatgaaagagtacatttttaatgtgtattcaatctttatttttagaaatgctgtatttttcgcagttgaattaactattcagtgagacaacctgagaacttggtcttagcatattttgggatgtctaatatagtacagtttttaaaataccttatatttactgatttttgtacaggcataaattcatttaaaaatcgcaagcttcaggtctgtttacagattcatcttgatgtccacttcaggaatccaagtgacccaacagttctctcttaaggcaaagtaggcagcattttcttcaagttttttcccctcatcagctttctttcattcattgaaatgcatgggtagggatagaaatttgagttaggaggaggttcagtaagtgatctgcaaagatgaagaaacaaccatggtcttagttttggaagtaaatggagtagctctcgcctgaacaagtgaatgagtttgaaagctgcacagtccatttgggtattactgctcatgaaattagttgaccagttcctcatcaaaatctacagtcctgagaaaggtcccagaattctttcttcagccaaccagctgggatcattgtcttaatttttttaaaaaatgtctttatttttcaagatcccttttttgacccaacaagtggccaagttccattgcctcctgccaggagagcagcaggagacagcggcaaagccaacagagcctcgcaggactatgaccagctcccttcatcttccggtgagttggctgagaacagtaacaatattgtcctgtgtttttacagcgccttttctctgtagcctctgccttttgtttattgcactatacctaagcattcacttactgtccatgtccttagtatttggcatgtaaagcgtacattatgaaaacaacactcagaaaaatacctgggggaaagaagaagtgaggcttactattctgagtgaacagtcagtaaactcacagtctttattttgggatgcattctttcttttgatttccttttcttatccagataatatccttgagcatctgcccttactggttttttgttgttgttgttgtttttgttttgttttattgtttttgttttttgttgttgtttgtttaatttctcattaagactgacaactctctaaaattcatatcagtaacaaaccatgttactgttaattgtttactatgggttttttattgttgcttttgttgctcctaatgttgtggttcgttgattgattagttggttggctggtttgctggttggctggctggctggttagttagttgctgttagggtttttttgttttttgttttttgtttttgtagtgaagtgtgggccttttttatctgcatattaatccctttcctgagagttccactctcacaacttactcagctactataaaggcctgaagatagtgtggccctatgccttgctcttgtgtttgttcttcaggcctttatccaactaaccaagcaacaagccacagcaatgccagcacttggaagctgagcaggaaccttacaccacgtttagcaacagactgagctacacagtggcataggaaagccaagaccagtgtggcctatgtagggaaaccccatctccaaacaaactactcaagtgagacacaaaagtattcctgtatctcagttctccttctggatgcccaacgcataaattgatggggaccgaaagaagaggtgctagatgtaatagttgcataatgggactctctgaatcattgagctgctttgagtattatcagcactgtacttttccatagtgctgtgtaggagatgcagaattctccataaaaccacaaaagtgttaacacttgtatatgacctgggaaagcacagaatagtttaaccctttcagattttggtccatgttgtctgcctgatcacatggagccactcagggctttcagatccgtctgtgtatagactgtagttccaaggagactgacaaagcatggaaatcaaggagggaaaatatctgccagccccatgtgacataagaaagcaaagccattactgaaatattgttgaagtacacctttggccaaaacaccacgtctgacttgaaataatatattcagcacctctaactcttaaaataatggtattcattcacatcatgagtcgagtcatcactaatcactgttttcacaggttcttctctgtgggctgcacaacatgcgagtattgtggggtcaatagcatcattcatgtgcaggatttcgagtgttatagattggggttgacattacaatagaaacttcaagagtgctttgacttgcaaacagagaaacacccatataacgggactaaactaggatttacgtaagaaattagaaaataattctaataatcagagccagctatagcatcaagtatttcatcctacttcctaaaccttttctaacactagcaaagcatgggactggtgccctgtgttacacactagcaaagcatggaccaatgcctctggttctgacctgtgtttgttagcaagaaacatgctaggttttggttggttggttgggttgggttgggtttttttggggggggtgttttttgtttctttgttttttggtttagtttgtttttttgggggggttgtttttttgttttttttgtttgttttttgttttgttttgttttacagatacacatctgtactagcctctgaattaggagttctcattttaaaacctgacctagatactatgtgccttcacagtctcttcttgtcaaaggccctactaaatggcctaacaaggattctggtgtgattgtgaactctaaaaccaagaatgtctatcatctttcagagctacataaataagtgatagtagcttactcttccatgaactatgaaaagaacagttctaaagattcagaaacagtgttatcaatataaaattatgttccttgttcatctgtcaaaacatcatgtgcgcaagtgcatctgtatagctgcgatgcacttcaagtgcattcattcctctcaaaggaagtatttcatagatttaaaaaagtgaatgttgccatcgatatttttaccaaatgattgtgtgataaaacacatttataaaaataaaaataaaaatttcactggcttattttaaaaatcacatacttctgggttggggcaactttcctgccagtaatcgacttactctttatacaagcacattactcacacatagcttgtgtcactaatagctatgtgtaagttttataaaattttgatgccactttccacctaatgtatattgtgctgcagtttgaattccttgagcattccataatgcctgttcttacatgcagcattacccttgaaggagattattcatatcattagtagttaaaaggtacttcaaggacttgaaacaatgctaagatgtctgtgactcacatgaaaggattttatttctgaatatactgacaaattaaggaggtgttgttataaggggaatgagctgcagtgctgtgtcctttgtttattattggcttaatggaaaattgaagggctgttgaacagattgttatatgggtaatgggtttggaaatttcagctggaaatcagagctgtaattcacacaaggtgtagagaactgtttaagttattggtagtcagtgatgggtagtttgccattaacactcggttcggattccaggatgggaatgtcagtgtcgttgatctctaccagttcagccggtagttgatgccacttgaaaaccttcacacacagctccagtttaaaacctcggggctggagtcttttttcacaaagatctgaaacagtcttgagttctgcattctgtgtattctaagcacagttatgtgaagatttttcatgtgttcgtgtttcactgaaaactttatgtgaactcacagtgtccagactaattcagcaacacaatgtaaataggctccaaaattaattaacagtgcatatatttgaaaacaagattgtaatatattttaagattttgttcattctttattcagtttatttcatattatttcttctaattatcaactattacaaaacataagaaacgtaagaaaattattggtcaaagggtgttcatgcttattccaagaattgtatgcatttcctatatcactgtaagtctatatgtaactatatgtacatgttatataatatttaatttatttaacatttactataggatagataactattttaggaggctagaaatgagaatcacatatatcatttagtatacaaagtatattacacacaattttttctatgtagatacatagttgatattttacataatgtatatactgttatatactttaaacataactataatataaaatataaataaatgtgtacagctgcaataagtttaatttatagattaaagaaaaacagcatgttttactaatctgccaaggatcccacaccaagtgtcagcccaataaaatataagttgatttcaacaatttttagtaaggtgttcaaacatttattcttttattgttaatgaagtttgtgttgtgattcccacagtagccaaaccaaaaaaccaagttaggacataataaaaaataacagctttgtgtaacaatggttgctaaagcattcgtggatcaccttcctagtaaaacagaggaagggccatgaaggacgagcagtgaccatagagtagtggaaggcaccggaagcagtgaacgccccaggacctcggcagcgcccctccctgggtctgctactctctcatatcagacgatcctcagcatctcagtcttggttcaggagcagctcgcgtcgtctgtttagctgtggtgctgtggatcgcacgagcgtgacatacgcattcagaaacacaatgtagtgtagacggcagcggtaagaaaggaaatcacttagagctgtgccacgggggtgtcccatggattcccagttggtttcgttccgtggtaagatgtaggggttggatttcaatcctctccatgagatacttgatttccccagcaccatggccgagacatccctttccccgttgtgtgacttttagtgactgtaagaactggctggcggcagatgcgtaggttctgaatctcggttccaccagcctccgagtccgtcctggtgccgtggctctgtgatgcatcttgcagtgtggtatgggaagcctccagctctctgctgtgcgttcagtgtggccttggctctttgagatccccgagctttcgggtggatattgggggaatccacagatggatttgaatctatagaataatttataaattacagacattttatcagtagtctgttggtccatggatatggagagttttcatttttgtttttcatgtcagtttctttgattattgatttgtaactttaactgtagagcttttacttctagggttaggttcatccctgaatgttttatctgtagcttttgtgagttttatatcattgagttactactaattcttgtatgtgagctctgcgttctgccacaccattgaattaatacttactaatgctgttttggtggaatcctcaggttttgtgtacaaaaatcatgtacgcacaaaatcagtcacacgaagtgtccattgaactcccttctttatttgtatggcttttgggttgtttcttgttaagatgttcggtttgaaatgtatggttggttctgcactgagtaacctggtggcaatgggcaactgaactcagagaaaatccttgcagcttctctccattcacattaatgccatctaggggttgtacttaattcatgctgtgttgaggggcttaatcatagagaagtgttaagtggtatcaagtgcttcttgtatatctgctgagatcatatggtcatatcgtttccatattttattgtcagtatacacatatgtgtattgatttccatatgttgaactatcttttaactctgagaatgcaaccaacttgaataatagtgaataaacttgagtccttgggatgaaaccagtgacttactagtgagtttgattccatgaaactttgttgagaatatttgtatccgtgttcatcagaaatattaatggtctataagttgttgttgttgttgtttgctgctgctgctgctgctgttgctgctccatacttgtctggttttggaagttggatagtgctagctaggttcttggaaagttttcactgttgataaattgcaaaaaatccaatgaaacgaaactaggcagttaaacatcactggtgagcctcctggctgtgggctcccggtgagggacttcattggtgattcaatcccattaccaccattgttcttcccagattctgtgtcctctggattttcctgtgtgttggcataagttcataggggtctctatgtttacctttctctggctgagaccgcaaggcttccttttccctttctgaccatacctacttgctttcccaattaacctgtctggaagcttatcctggttaagttcctgaagaacagttaatggttcgactaatcctttccagcacttatttctgcttaaatccttgttgtttccttccatagactacattaggcttaagttggttcctggttttctaagtactggacatcaccgggatatgtatttacttaagggttttgggagtcggtttgagttttggggttttattctttgtttcttcttgttgttgctgctgctgctgctattgtcttgtgggtttttggttggttggttttggttttggtttctttgcttgatgtccctgtttctgcacccacttcccgcccactcatgccccgtgaagatactcacagcctgtgtttatacctttggatgccccttgttacatatcacacgttttctctattgtgtttccattttcattagtgttgcgaaatttttgaatgctcccagctttcttcatgacccacttagttgttaaaaagaatcttcggtttctatgaatttttacaattttcagaatctttttgttgagtcatatgttattccattttgatcagaaagaatagagggtaccacttcagttattttcaatttgttgacttaacatggactattctagagaaagtttcatgttccgatgaaatgtctgtcctgcagctgttggataaagaatattctgtaggtgttatttaaactcatttatccctttcagagtttagctctggtgtttgctcatatctttatctggatgatcttgacagatgcaggatattgacatcttgtcgccatcactatattgaaggctgtctggccttccatatccaatgactttgttatataaaaacaaacagtattctgatgataagttcatatagattcagtcatactgccttgttaattggcttctttatttaataacgtgactttctttgtctccttgggtttatttttagatgtaaatgtagctggtcctgtctgtcttaagcttctgtttaaaacatccatcataaaccatcctttactctcggcctgtctgtgtacttaataatgaagtgagtttgtgtttgcttgactctggggactgatttaactggagagtgagagaaggaatgacacacagacatacacacaaaagctaggatcaggtggcctgagactctccatgtatttatagagattggaaggagggtttttaaagacagacagacaaggaagcagggttattatataaaactgtaaaactgaacaaggagttgatgtagctagtgttcataggagcagttcctgtaggggaacagttctcaaactgtttacatctggagagagaccgctatggtgaacatttgatgcgcattctgtcaacattcacattcagacccaaggaaagcttttccatccctgagcatctctagggctactcctgtaggactgagtccttgtcctcgctttgcccaaatcaaacaatacacatttacagagggcttctcttgctccctgcagtcttaggagacctgttattggaaattgttttactctcgtgtgtgtgtgtgtgtgtgtgtgtgtgtgtgtgtgtgtgtgtcttagactttatccttttttgctcgttcactgtgcttgctccattgttctgtagtgtatctcttcagtgaggtttcctattttacatgctttcatgatggtgattacatttctttcacttcagaacgtaggaattcttatacctatttggaagccgtctatggtaatccgacaatttctcactggcagctgtcttggaaggccttggttccctggatggatattgtcatcatggaaagcattgctttctttcaagaatctgaatgtatcccttaatgctttcctggcctataaaatgtctgctcaagcattcagtgtcactctgatacggttcctttgtgtgactttgatctttccagtggaagatttaaagttgtttctttgtgttctatagtttggacagtttaattgtaataagttccgtgatgatcttttctggtcatgttgattgggatgctgcatttgtcctctacccaaatgtttgtaactgttctaaggtcatgaaatcctctgctgttattcctaggttatcaatgagcttttttgcccctgatgaaatttttctcgttgccttcggttattccaaaacgtcagtttgggcttttccgttttggttttgtttccgtgtttgtttctcatttactagcatgccagagatcttgagtgctttatgtttgtgttgggggcacaaacaggatgcttcccaagacacatctgtgagcccatgcctctgcccctcgatgcggtgagctgcagacctttccattctgaactcctcatgtctaaactgtgcttggttcgttctcctttggagtctcactttacgtttcttatccttgttgcccacactgacttcctcatttcactcacctggtgcttgcttgcttgcttgctggcttgcttgcttgctttatttatttattttgagctctaatttttttcctactcattctttttaaattattttgttttgtcaagcattttatctgtgtctctttctagcttttcctagaggcaacatgctacctttttttgtttctcaaatttttgtgctcctgttttgaaacttgcacctctggctaattagttattcctgcttttatgtggtagtcttattagaggtggggcctttgagattaccccatccccagtgcctttcagctcgtgttgtatttatacaggtcataagtattggagattttatgggtacagctttccttttatatataaaagacactgtctcacagcaggtgtcctggtcctctccctcttacaatctttctatgctcatcttcctcaataaatgttccctgaaccttaggcatttgtttgatatatacagcgctggttttgcatctagctggtcaccaactctcctttcttagattcttatgcatttgggattagtgagtttgggcactgtatatgtattgtcaaaatcaggtataccggttctctgtgcatcccacaggaacggagactcactagccctttgccaggtaaggtgggatgggcagcagacagtgtgaggagctcactgcataaatactcctgaaattgaaacagtggtccttgctgtggcttgaggtgggggtggaatcaacacaggccctgtgggtgttaattctacttaattaattaagttaattcagtagatgttgtgctttttgtgcagcttgaagggactgagtttggattcccagaatgcgtttgaagccaggtatattagaaggcatctatagtctcagccacctacagtgaactgggagtaagaaacagagaatctccagagtcttgtaggccatccagcctgacgtatgcagcggaacaagagacgctgcctgaacaaggtggaaagcaaggactgatccacagttgtcttatgaccatcacatgtgggtcatggcaagtgtggacccactctcgctctcacacacaaatatagacacatctacacgtactgctgcccacatataaaagaatgaattaccttcagggtcctgcaccataagccagtctcctgctgatgcttttttttccctctgtttgcattttcttggacaaaaatgcctacatcagaatctaaagtgtttgcttgagcaaaaccacattgaatttgctcaacctgttgactgacagagtcagaccatctgcgggttttgtttcccttttccttggtataaatgaagtgcagcagattaacttggaaaaccagggaggaggaaaccctacactgaatttcgtggagtagctcctccaccagagcatgagcaggacagaggtcatttggggactattctgcacttttaaaattttgtcattgggatgcttatccctctggtaggaacctctcaactccatccttcttcctccttcttctttctccttctcctccttctcttcctcctcctcttcttcttcctccttcttccaggagctacagtcagtgccacagttgagaaagatataatatgtgactaatccaatcttgtcacttttattctgaacttcaactgttattgcactagttttttttgttttttggtttgtttgtttgtttgttttaaagcaactcttttctggcctaaaaagtaaaatatggaatcagaaattaagtattagttttcagtcaaactactacattctccccctagatcctaatttttaaaatgaaataacattttccattctgcaataagtaactaacaaataaaaagagttggagagaaaatgaacaatagtatttaacataaaataatgacgtaacaatattgtcttctatagtgttcatttttatctcactgtttcactggtatctgtctttgacaatctccacagatggttcgcaagcaccagctagaccccccaaaccacgaccccgaaggactgcaccagaaattcatcacagaaagccccatgggcccgaagcggcgttggaaaatgtcgatgcaaaaattgcaaaactcatgggagaggggtatgcctttgaagaggtgaagagagccttagagattgcccagaataacgtggaagtggccaggagcatacttcgagaatttgccttcccccctcctgtctccccacgtctgaatctatagcagccagaactgcagacaccaaagggcagttaacaaatattccaggagtatgagacagaaggactgagagggaatgcaggagccacggtgtctttccgtgtggcttccccagaaggcagcctggagtccagcttctctggttccacagctctcttaggatgcccacactgaagcttctgtgtttgtgctagccatactttgaaatcagggttgaactgataaaataatttaaagacgtttactcccccttgaactttgaatctgtgaaatgcttttccttgtttacacgttggcagaattgcagtttgtctctgtttttgatccctgtactgtgttcctgacaggccctttgcagagttgctcaggtctgctgtaagtttctccatgcctgccctggtgcccacatcagaggctaaaccatctctttgttttgctctctatccgggccccacctcatgtccccagccaggtccaattccatttctcccattcacacggcacgctagtctgaaggtcctgatttttcagtgtttcaaactaatgcagaaagaaaaaggaaaatgtgtgtggtcttgtcttcactactgagtcttttctttgggaaccatcactgttgagaggtgggggaaaacctgaatgtaaaaagcatttatttgtcaataaactgccttttgtaaggggtttttatatactataaaagagcttctcttgttagtttaagttctgtgacctttaggttcccgaactctccctctcatccacccaggagtgtcataatgctgtaaaagtgactgctgcagatgcagggaaaacaggcttgcaggagactgcttgtactccagtaccataatgagatgccctgatattaatgcctgcatcactttcaggagagatggaaaaggggaccaccgcctggaaatatgttaatatgcctttagataaggtcatggacatacatgcctttcccaagtggaatagagcccattttctattttatgatgtcaccctggctcctcacagtgtgggagccccctaaggcactgacgactgttatgtatcactgcaactgcaggccttgtaagttgcaaaactcttagtaccctttctccactcatggtaggagtcctgtttactctgtgggttttgttgttgactgctctgtgttgcccccatccaggcagatgaaactgtggttacttctaatctatggatatcttttgaccatctgtaatgtgcgttgcactcttgtgggctttgaaagcacaaactctcacacatggactccatcatattatttgtgtagatgcgtttggtggtaaatgtctccagtctgatggatgaagcttccaagattggtgtaaggactttagacctctgtggcaatttcaggtttttgggttgggttgggttaggttgggttggggtttttgtttctttggttttttgtttttgttttgttttgtatccctaatagtggggggaaaagaataaaaactatctctgtgcaagaatgcttgaaccacattttgatagtttctaaacattgattttaggcttgtgtggatgtttcttaccactcgttactccacacctagtctcacatacagagatgcctcggataatcacttatcctgacaaatgacaagatagtaagtacatcagacagatccgatggagctgccattgtacaagactcatggacaaagctgtgtttgtccaggaagggaacccagcacattcttttacagtttggcttttatggaatgagacaggatttgaggactcttagtctgcatattttaggtttgtttggatggtcttatgttgcttctgctaccagaggtgtatttttttttttaatgttttcatatcctatacctgggaggaggtatgaatacaagtttttttttatactttctacaattggctatttgttgttttcttatctgctcttactttctgtacttgttttataagttctgatgtcatactgatacagtgctgtgtctgttgggcttcatgtagcttgccagcaatcagcatagcctaatacctagagttgcccctttgttgtccttacactgttaaaacatccttaaaggaggagggggtaggtttacaagaggaaccctgggacccacagcatattcacctccactctcagaaagtacaagagattttcctccagaatttaaaagctaaggatgtgctgacacagttttttggaacctgaagtttcggcagggtagggaagtgtaaataattttctggattgtaccaagatccctactgcagccactcagtagccactgttggttttctcatcaaggaaagtgaatcttaggagtcatatgtaagacaaagcaaagagaaaatgggaaaactcacaaaatttatttgaaaaaaaaatgttgaaattatttttcattttgaaagggactactagttaatagttgctaactaacacaatgttccacactttgttccctctgatccagaaattgaggtgcccccccatgctcaagatctgataatagaattaccctcaatccaatatcttatatagtctgcacaattaaaacaaaccatggctaattgtaacccctacctgggatccatctccaatgatattccagtcattgtttttctagaaatggggagttatttttttccttttccttttatcctccccaccccccaccctgcacctgacttcttggtatctgatatatatcacagccaaattttctggacacaaatactggcattttgatgcttaacttatcatggtcccacaattccagtagatagcccttttccacgttctccctccctacagtacaacagagccctggctacaaccttcagaagtctgtttgctaactcagtatttcacacacccaggacacatgcagagctcttcataatgtgaacttcctaattgttcagttccagaagcatttcctgcagtttgaacgtgactttgcctctcggattttcaacttgaagccttagtttgcactgaattgtctcatctggttttaaaatgtctcaaatggactgatttggaatcaaaatgtggtatattttaaatattgatgcaggtactttctgtaagcctgaaatgttgagcttcgaaggagactttctggaaaaagacagcaatagaaagttttcttctcagttcctatttttattgttttgaaatgcagtttttacgacttgtctaatgtggcaaaatagctatgtgttcaattaatttatattttattcttttttcatttctggatatgtaacaaacctcaagtactttatctgttcttttaaggtattttataaaatgaatgttaacaaa

SEQ ID NO: 9 - DNA, 91274 bp, Homo sapiens
gacaacgagcgactgggcggcggaggacgaggaggaggaagaggaggccgagcaacaagatggcccctgctgcaggagcagcctcagcagcagcaggtgggaggccggaggcggtgctggcggtggcggcggcagccgtggcccggcggcctgggacagaatcagagtcaacggtggcctcggcggcggcggcggctgccgcggcggtggcgacggccgcggggactcggagctgagaggagctgctgctcggaccagcgcggtgagcgagcggcgggcggcgacttggggagcggggctgccgcggccggggcctcagtcgggaacaataggcagctgtggtcgggaagggtttgtcctcgcccgccctctgctcctccgcggcagcggcagcccggccggccccaggctcctcagggcccccgccggctgttctggggcttgtcagtggccggcgtcctttaggcctcaggcctctgcatgccgcctgtagggcctgtcggggtaggtaggccgagaggaggacgaagggaggctcggacgagagggagggggcgaaagggctacctggctcctgtggtactcccagggcctgggccaggcggggaatgcgcacgggaactgctttttggacccctagtctgtgggggtgggggagggcgaaggcgtctgtaaacaggcgccgcctcggcctcccagcacctcagggctgcttcctcccccagcccctgaagcgctccccttctttggccaagtggatttcacggtgtctgtttccctgaagtccctggagatctagcctggtagtcttctccctgctggcgatgggaaaattgtgtgtgtgcaggtgtctttaaaaaaaaaaaacaaaaaacttaaatgcaacaaaaacatataaaatgtggttatcggtaaaggatggagtggtaagggatgcgcctctctaaacatctctaagtatcagttctataaacatcagttatgcccgcatcccaggtgagagtggattgaaacaagggctcttttggaacagtaataacacaactcttgacataccagaatagcctatgaaactggaaacaaacactggcaacgcggagacaaactgtaatgtttaaagaggacttttattccagctaggcgttttgaattactaacatgcagtataagaagcaacattaactagcataaagtggacctcaggaagcacttcgaaaggagacaggtggttcatctccggccatagagcttcttgtgccttgtctcgtgtttcagtaatttttcctgaaattgttcaagaccagtcttttctctgagtttgaaatttgatttcgtttttgttttgttttgcgacggagtcttgctctgtcacccaggctggattgcagtggcacaatctcggctcactacagcctccacctcccggattcaagcgattctcctgcctcaccatccggagtagctgggattacaggcgcccgccaccatgcccggctgatttttgtatttttagtagagacggggtttcaccatgttggccaggctggtctggaactcctgacctcaagtcatctgccctcctccgcctcccaaagtgcttggattacaggcgtgagccacctcgctcagccttaaacttaatttttcaaggcttctaccacattttcttacaagtgagggaaaaggtagatttatttctaaagtactttctacctaggtatgcagaaatttatattaaaatcgcttggatacatccaaggagattgcttttcacttgttaacattcaactgcaaggcctaagggttataggttgtgttcttttcagcactgacctgtgctgaaaagatgccagttaatatctttcacctcttctaagggtaaatttctaagtagaattggtccaagtctgttctaattaaaaacattataagcagcactagtctagttcttagttcttccacaacaattgacactgaatagattagcaattgaataaacataaaggttgaattttcttgtttaggatttgaagtatagtgaatgaatatcaatactgaccttcattttatgcttagcataaataatgttggagatgttttgattttttgaatgatggagaaataacaactttctatggctcctgatgttgtgacttttttgcagatatttcagaaaggacaccgtttttcaggtgctcaaatctgtgattttttttttttttctgtgctaattttgttaggtcagcacagattccaagtaaagtctgtgttataatgatacttaaatttatgtatggccctaaacctattagaacaattgtagtaatttataggttgtaagttttaagtggttcatgtgctgtgttatgaaaacaatctcaccgtgttatgtcaagggcagatttacctcatatttaatatcattttcctgaaaataaatatttttaagtggtaaggttttgtatttcagattggttattgacccagcaatttatgggcttagtctgggtccgtatttctgttcaataggaaaaaaatttagggaattgtttttatttattttgtgtcaaaacagttttaagttttgacacaaactcaactgtcccttcttcagtatcaatacttattacttaagttcacattttctcaggtaataaaaatttacttctaagaagttttggaaccagagcttaagaattagatttatattttcttggtaatattaaaagttaatatatgcttgatttatttgaagaaataaaaaagggtaatttgtacacaacgcctttcagaacatatttgttgaatgaataaaaatatttaagcttcctcattatgctgcagtattagttctgttgtcctcattttttcatatgaagaatgtgaagctaagagtagctatgtaaccagcaaaaagatcacataattaataggtaaaagagcttactcagactcagatcttgtgacacaaattagattctttgccactaccacatgtgtcacagttaaactttgaagcatcttctgtgttgacagattcctttttttgcctgtgaacttaccctattatcattatttgtatcctgtcagatatctacttgtaagaccaagaaagtatttgttcatgtgaatcacaaaagaaacacttaaatttttgtttttagcatatctgaatgctataaaatataaaaactcatactgtttacataggacagatttatcatactgctgtaattgttttcatggttaatttgttacataggcaattactaaattgtgcctttgaaatactttataaatttttttaaataattaaagatattcaatgatgttaaagttgggtcagctaatatttgaagttcttaatttataattttttttctttaagccatagataatttagaattctgcagtatttttcatctccagatcttagggcttgaaatggattctgatgggtctaatcagtccactcttgcatatatcttgaaaatggtcagcatccaacaaagtgaagaataaactgataaatgatccctgtttggtgaacacctcagatcaggatgttccttggcagggtattctgacctggtttagctttggccccgtctgtgctcagggttcaggtattctgcaggattgggttcagagggattaaaattctcagattggcctgtatcaaaacagtcacagattttggtcagccttttcccagaaccgtctccaagattttttcttttgtgtaattctggaatctaggctggatttggactagctttagaggttatgataaaagattaattttgtcaggcatttatacaaaggaggttttcttactacagagtttcttaaggtagattccttctatttttgaagtgtgacatttaccaatctgaagtaatgttgccctacatcccccagacacttaactttagcatatttatttctgtccatttttggtcaggattgtgcctgtttacttatataatattcttgtttactttttgtttattagatacttcttattagtttatattgttttcctgattgaggcttggggaaagaattttcctcaaatttaaagtcaccttacttatttgcagatgtatgtcagagcaatattcttttgacagttatcaagcattttagcaatgctgtatgtatatattatgaatgaatgacagagtcactcatggtctgtcacccaggctggagtgcagtggcattatcatagctcacttcagcctcaaactccttggtttaagtgttattcccgccttacctggctactttttttaatttttattatttttatagagatagcattttgctgtgttgcccagggtggtctcaaactcctgggagcaaggtgatcctcccacttctgcctcccaaagtgctgagattacaggcataacaatgttttaaactgacactggtataccttcactgattattactgtgcacatgtggtaataatttaacttataagtgcattttatctaaaaaatttccaagatctaaatagcatttgaacatggtagcagtttttttttttttttttttttttttttgagcaagaaaagagttctaaaggggtcagttttatctacagattaacataattttttttattgaggttaagtcacataacattaaccattttaaagtaaacagtttaggtggcactttatacattcacaatgttgttcaaccaccagctctaattccagaatgtgttcattaccccaaaaggaaacactgtacccattaagcagttactctgtattcccctcttccctaatccctagcaaacgccattctgctttctgtctctaatttgagccaacatcgaggaagagtactctgtacaattgaaattgcagaaaaaactttgggatgtgattgttaggaataaaaaaccacctaattctttgcatgcttctctaagtacagtagacatgctgccagggactctttatggaagaaaagttgagactcatagaagtttgcagttttgttttgatcaccccagagggttttgctcaaactcttagactcatttgtatttcttcattgggttataagaactaaaatttaatgttctatacaaatgtgaacaactaatacttggtctcctatctagaacttgtttgccttttaggttttcttaatgtatagaagaaactaggaatattcacaaaggatttatttgaagttacactgggaaacgatttttagaatttgaagctctttgatccctgtgaatctaactttatgactattttattcagctaatctttgagaatatttagagttttgatttgcgtggcactctgcttttaatcccttgttgaataagtgttagaaaccttgatcttggccctatacctgatcacctctaaaaacatgaacagtgttacaaaggcagttgtttagtaagcttttttggattgttttaattggctgactgagggagacaaaattagtttttttttttctttctagaataaagggtaataaacttggactttagagttactgctaagattgacatttccatttggggctttagaaatatattgttatcttaaattcaaaatggtactttatctaattgaattgaaatcttaaaatttatgagaaacaaaagtcactttatgttcttagtaaatatttctaatggggttataggagatctaagtacaaaaaaaatttaaaattttgttattaatctcccctccttaaggaaaattttattaatatacataattataatttagttataagaacaacttaagttgagtacagtggctcaagcctgtaatcctagcactttaggaggccaaggcaggaggatctcatgaagccaggagttccagaccagcctgggcaatagagtgaaaccccacctcaaaaaaaaaaaaaaaaaaaaggaaacttaaaaaatgataaggaaaaggattatgtcagaatatttagaactctgcagtaaaatttctggttttctgtaatttttttcaggaaaatgtcaactttttgtaaatacatgtttctgtgtttttatatatgcctcattaattttttagactaacatttagtggaaagctaatgtactcaattaatacatttaaattataaaaataactttttttttgagacggagtcttgctctgtcacccaggctggagtgcaatggcatgatctcggctcactacaacctctgcctcctgggttcaagcaattcttgtgtctcagcctcccaagtagctgggatcacagactcatgccaccatgcccggccaaattttgtattttcagtagagatgggatttcaccacgttagccaggctggtcttgaactcctgatctcaggtgatctacctgccacggccttccagagtgctgggattacagacatgagccactgcacccggccgaacttttatcttgaagtagatagtgtcaacaaatacaaaaataaaaataatgtctttaaatgaggtgatgtttagagctatatccatgaaaaatatgggataggctaggaggcggtgactcatacctataatcccaccactttgggaggccgaggtggcaggatcacttgaggccaagagttccagaccagcctggctaacatagtgagaccccatctgtattaaaacatatatatatatatataaaatatgaggccaggtgcagtggctcacgcctgtaatcccagaacttcgggaggctgaggcgggtaggtcacaaggtcaggagtcgaagaccagcctggccaagatggtgaaaccccatctctactaaaaatacaaaaaaattagccgggcatggtggcaggcacctgtaatcccagcaactcaggaggctgaggcagagaattgcttgaacccaggaggcggaggaggttgcagtgagctgaaatcatgccactgcactccagcctgggcgacagagcgagacttgtctcaaaaaaaaaaaaagtgtagtggaaaacttttgaatgaaacagaatcactaaattcttagctttattatagaacagtatttaatttgtccaggtctcagtttagattaagaagtaggccaaaaaaaaaaaaaaggcctataattatcagaaaaattaatgaactaaatcatctgcactaacatattggtttagaagttctcttgctttgtacataattcaaggaatttgattatctattttctcgtcccacagcagattaaaaggtgcaaattagatgttggagtagagccatataggtaggatggagggccagctgggtggcaggaaaaaagtcacattagcctgaggctgtttaaaatagggacagcagttacctatacaacacctcattagactctgagtatatcattaactgttatattgtgctatatataaagtattgctcctgatggaaaattcattgtgggaaaattatgtttgtaattttgggaatcataaacatatatacagtagagtggtgtatattagaatatagacctcgctaaaaaaaatagaacatacactttggagtccagtatatctaggttctcatcttctatgacttaagcattataattcctcatctctaaaaacagaaatggtaatacttttatctaaaggttgtttggaaatgtaaataataatatctttagtatagtacctgacacctttaatgaatgttattttcctccttaaattctgtttaacaaaaattagaaagatattcatccagaatatttttgatcaagttctactgtaaaatgttaatatagaagctacatataaaaccttatatagtttagggttaactgtatgtgtacttttgggagtggtagtcagaaatgaagtaattcttcatatgccattctcattttcttcccacatcagtctatttatatgggcctatgctgttcaatactggccactaactatatgtggctatgtaaatttgagttttttgaaagatttttttttttagaacagttttggatttacagaaaaattgctcaaaaaaatacacagttcccatttatactgtcccccacggtttcctctgttagtatcttgcattagtgtggtgtgttggttatcactgaggaaccagtgttgatacattattaactaaagtccatagttcacattaggattcaccctttgtgttggacagttctatgggttttgccaaatgcataacattatacatccactattctagaatcgtgcagaatggtttcattgacctaaaaatgtcccatgttccacttactcatctctgcctcatccctctgaacctctggctaccactgatctttttacagtcatagttttacctttccagaatgtcatgtggttggaatcatagtatatagtcctttcagactggcatcttcacttaacaatatgcatttaggtctcttcgtcagtatcttcttcttttgtttttgtttaaaatagagattggtcttgaactcctgggctcaggcagtgctcctgccttggcctcccaaaagtgctgggattataggcgtgagccactgtgcctggccctcttcatgtcttttcatggcttcacagtttatttattttactgcttaataatattccattgtggctgagcatggtggctcacgcctgtaatcccagcactttgggaggccaaggatcacgaggtcaggcgatcaagaccatactggccaacatggtgaaaccctgtctctactaaaaatacaaaaattagccacacgtggtggtgtgaacctatagtcccagctgcttgggaggctgaggcaggagaatcgcttgaacccaggcggcggaggttgcagtgagctgagatcgcgccactacactccagcctggcgacagagtgagaccgtgtctcaaaaaatatatatatataataataataatattccattgtatggatacatttaaattttatttaaaatttaattcctccgtctcaccagcacatttcaagggctcaatagccacatgtacctagtggctaccatattggaaagcactgatatatatgattcccccaaggttcaattctccacttccattcactctcatggagaactttcctgtttatatgatctcagtttttcctcaagcctacattttcaatgcattatctattttgttttgttgcttgtactatcagcaaccctcaattggttatttaaaatcctttactcccccaaagaaccattattttcaaatgttgtccattatagtatggtttcctaggttttccatcacagcatcatctctttttagtctgctcttcttttttttaattttctaaaattttattttgtttttgatccttctttttttaaagaatttatgttgcagcattctataatagtctgatcctttttgtccttaaactctggaatcatctttttgttttttattttcctctaaaccttttgaatatttagcagaggtgtgcagatctcagcactaataaatggcagagttggtattagaatctagatctccttattctagttctttcttttcttttcttttctttttttttttttgagacagagtctcactcttgtcgcccaggctggagtgcagtcgcgtgatcttggctcactgcaagctctgcctcctgggtccacgccattctcctgcctcagcctcccgagtagctgggactacaggcgcccgccaccacacccggctaatttttttgtagttttagtagagacagtgtttcatcatgttagccaggatggtctcgatctcctgacctcatgatccgcctgccccggcctcccaaagtgctgggattacaggtgtgagccactgtgcccggctctagttctttcttgggatcaccactatttggggctacttttagaagttattttgaagagggtattggagactgattatgtattatgtgatttaaaatatctttataagttaaatctatagaagctatagctatagatttcataaacatattatttataattctttaaacaattagaaactaaaatgaggaaatttatcctaatcagctaaatagctgattctctcgatgcaaaaatatttgtcccttcatatgttacctatttttttttttgagacagagtctcactctgttgcccaggctagagtgcagtagagggatcagggctcactgcagccttgacctcccaggctcaagtgatccactcacctcaggccacccctgccacctcatccccacctggtagctgggactacaggtgcgtgccagcacaccctgctaatttttgtattttttgtagagacggcgtcttgccgtgttgcccaggctggtctcgaacttctcggctcaagctatctatctgcctcagtctcccaaactgctgggattagtcatgagccaccgtgcctggctgtgacccattttagatgacaaaaactaattttcaatgctaatacgaattggttgttaaaggtgaatataattaaactgaacattattggcatcctaaatcctttattggccataatttacctttggattctattcaaactacactttgatctgtagaacccaaattggttactatatgaacttgcatcttcctaaactcatcatgttaaaaattttcacagcttgaaaaatggaggtcctcatatcagtctcttgattttcttttgaggtaagctgtccctctgtgcttagtccttgactaaaaataatcgtactgcttatggtcttgatttgacttttctgtatactggttacactggctcaaaagtccatttttgtggagactcttaaaaagtagtagtcttccacattcaagtactgtacttgaaaaaaaaaaacctggatttcagctttcatttagaaatgctttccctgtaattactacttttaaaacccatattttatatgtcaatttttacattaattaccccattgatagcagtttttgaatggttttagttaaaactgtcaatcttctttgcttgaatctagcctctcattaagtttatcaaaaactttaaaaagtaaatgtaagactcttcatatagtgttttttttttaattgagttatggattctttggatttattcattatctgagttagttttttcagaaatgtcttcttattttgtaggtctgtggttgatgaaaacctgttcatgagggcacaaaagactcttccagtttattctatcactataaaatagaatttgatggatttcgaagtaagaaaattcttagaatagaaaataggatggtaaatctttaaatgcatatgagtaattagaatatcataaggctagtacagataatattcttacaaaggcatccataaatagtgaagtggtagcacctattcccccatgattgacattcattaattaatccattgtacccagagttttaagatgaaaagctttaagtaccttcttcccctcatgagtaatcactcctcagtgaacatactatatgcttattgccatttgaatatccttttctgttcaagtgtatcatcctttttaaaaattgagttgtcatggaagaatttgatgtaggtaagtgactatcagctgtgaggaaggtagaggaaggcaagaactatcctgaggacagagatcagttaaaccgttgctgtgtggtcaggtgtgatggctcactgggaggccgaggcaggaggatcgcttgagtctaggagtttgcaaccagcctgggcaatattgtgagacctcgtctataaaaaaaattaaaaaaacagccaggcatgatggcgcatgcctgtagtccagctactggggagactgaggtgggaggattgcttgagcctgggaggtcgaggctgcagtgagctctgatcatgctactgcattctagcctgggtgacagagtgagaccttgtctcaaaaattaaaaaaagaaaaaaggttgctttgtgatctaggtgataagactgtattctgtatgagagcaaggactttatttcattcaggactatatcagtttctgggacactggcacgtagtagatgctcaataagtagtttttgaatgaatgactaagggcctcaatcaagaaagtggagatgaaaaggaaattatagatacaagaggtaatttattattatcattttacttatttttaatttttgtgggtacacagtaggtatgtatatttatggaagattttttttttaatggaagataaaagtgaggacatcaggcatgattaccagaaatgtgcattgtctagtggtatcactaaagaaagattacagaaggaatcaccagctcaaaaataagaataaatttagttgccaagtgaccatcatattacctaacatctctgttacagtgttcttggccctaaaattaataatgagaccaaataggctcattgcgaggacgaagtgtttgcatgtgatccgcataaaagacttcctggcacatagagtgtactcaaaaatagttaaagatagaaacaaaaatctgtttgtttttgagactgagtcttgctctgtggcccaggctatagtgcagtggcacgatctcggctcactgcaacctctgcctcccgggttcaagtgattctcgtgcctcagccttccaagtagctgagactacagacgcgtgccaccatacccagctaattttttgtgtttttggtagtgacgggttcaccatgttggccgggctggtcttgaactcctaacctcaagtgatctgcccaccttggcctcccaaaatgccgggattacagacatgagccaccatgcctggcccacttttaaggagctaatatttcagtatcgatgggtatacactgtaacaaaataaatatgaaacacagatgttggatgagaagtattattgagaaaaattaatcaggaaagagatgggaagcatgcagtttaacatgtggttggatagcagagggctggggagggattgagattggggcatctatttgaaataaggtgatcagggaaggccttctctgaaggaattcatatattaatgcctatacagaagtggggagaaggttcagggttggaggaagagtaggacaaactatgttcttaaccagggtccctgtttttaccaagcaataaatagacttatctgtttattgtgcaatccacagtggttagacttatctcaacctttcatttcctcttccctataacatgcacactatacaaacctaagcgtgaatttaatccctgaaagatcatcattacatattttggaggaagtgtcatatttgattctgatacagcagcagccagtcagtaggttctctaacattagcagctacttgggaatcagcaaaacatctcttttttttttttttttttttttcagacaaagtctcactctgttgcctaggctggagtgcagtggtacgatcttggctcactgcaacctccgcctcctgggtttgagtgattctcctgcctcagcctcccaagtagctgggattaccggtgcccgccaccacgcctggctaatttttgtgtatttagtagagatggcgtttcgccatgttggtcaggctggtctcaaactcctgacctcaggtgatctgctggccttggcctcccagagtgctgggattacaggtgtgagtcaccacacctggccagaacatccccttttacaatttaatttctgtttcaaaccgctttatataaagataaaataataatacagtataaacaagatacattgtggctataggattctgtgtttggagttcatgtagcaattttttcgttcttttaaacccttcaaaatggaattttgcttgcaatagtagttgagaaataattctaaaatggaaaatgaatcagctcctcctcttcctccttctccctcctcctcccttcccctcttctgcttcttcctctgctgctgcttctgcttccttctttcttcttttctaagcactgtttttcaagtatctgcaattaaaagtctctgtgacattgttttctggaaatagtttgaattctaggaggcatatttcaaaacaaaacaaagtaatgaaatgtccttaagacctaagagattatggggaaatacattttaaaaatattgatgttattgctattattaaatatactaggtttttaatgcaaataaaatttctaggtcagaatatataattagatatgtacctgttgtgaatacatctacatgtttctagaattagtcagaacatgatggcagccaccaaatgccacaaggaagtctaaagcacaggatcatagggaaaaagaaatagaagcaagtaataggagactattagtgtgtgacacatatgctgtgtgatgcatacactgttttcttgagtaaagaggagatttttgtctactttttttattgacactcatttttgttccttccagttcaacatgagaaatctgctgcattcaaaatctacaagtcatcattgctccaaaaataagttcacaaagggtagcttcctaactgtgatcattttaactggagtgctttgtaacagtttaaaatgtagtaaatgctgggaaaaaaaatctaacaaaaataatgttgtgtgggccggacgcggtggctcacacctgacatcctactgatctgggaggctgaggtaggaggatcacttgaggtcaggagtttaagaccagcctgggcaatatagcccatgtctacaaaaattgtaaaaagttgcccggcatggtggcccatgctcatagtcccagctcctcaggaggctgaggtgggagggtcgtttgaacccaggggtttgaggctgcagtgagccatgatcatgccactgcactccagcctcggtgataaagcaagaccctgactcaaataacaacaacaacaaaacattgcatgaaagaagccaagtacaaaagaatacatactgatgattccgttatatagattttttttttttttgagatggagtctcgctctgtcgcccaggctggagtgcagtggagtgatctcggctcactgcaagctccgcctcccgggttcacgccattctcctgcctcagcctcccgagtagctgggactacaggcgcccgccaccacgcccggctaatttttttgtatttttagtagagatggtgtttccccgtgttagccaggatggtctcaatttcctgacctcgtgatctgcctgccttggcctcccaaagtgctgggattacaggcgtgagccactgcgcctggcctgttatatagaattttaaaccgggcaaaactaacctattgtgttaggagttgggatagtagtgatatttggggaagaataaaggagtaatcattgggagggatagtgagggggggccttttgagatgctgataatgtatgtcttaagtatgcaggtatgctcactttgtgataattcgttgaactgaacactcttgatctgtatgtatgttatacttcatcttaaaatatcagtaaggcgtcttaagatatatgattcattttattttagttcccttctcatttctcagtgaaatattttaataaaatcttcaagacagagttatccttttggttctgttcaaaaggaatacagtagttgctgctacaacctaattttttctttttaataaacaagtaggtttaaacagttccagagttcctacttaaaaccagtcatgctcagattaaacccaaaacaggcatcatttaatttatatctttaattatggctgactaatgattattaaaaagtataataaaaagttacaagtgctcaaagttggaaggcatggtgttatagtggaaaaaatacaggttttggagtcagatagatgtgggttcaaattatgactaaatcactaagttagctgagtaactgagttttctttccttccttcatcagtaaagtagaggtaataatatctatgtcagaaggttgttggaaaggttaaatgagatagtgattggcagtcaaacgcccttcttttcctcctacagtttcaagatagagaaaatatttggggagtatatgaagatagttgtaggtaggtaaaaaagtataacttgctgaagatgaccaaccttagctaatgatggtaaagaacagtctttatttatttatttacttatttatttattttgagatggagtttcgctcttgttcccaggctggagtgcagtggcgtgatctaaggtcactgcaacctccacctcctaggttcaagcaattctcctgcctcagcctcccaagtagcagggattacaggcacccactaccatgtctggctaacttactgtatttttagtagagacggggttttgtcatgttggccaggttggtcttgaactcctgacctcaggtgatccacctgccttggccttccaaagtgctgggattacaggcatgagccaccgcgcccggccaggaatggtcttcagattgtcaccagtaaggactaacaacatctaacttggaaacacatgaaacattatcagtattaagagttagtaatgctactttggctcatcaacatagaggactgttgcatggatcacagcttaagtatgttgagctggattatgatacattttagataggtttaaattaagcacaaatggtaaatatttttaagtcaagaggggttcattgcccatgttgtgctttgaaaatgtatccttttgcttttctgttactgataatttatgatgcaggattgaggagccaaatttaggcatgttgtgtttgtgaaggtccgtcagtatctttgtgatttttagagcctaaaaaaagataaatatgttctgtcaaaaaggttatgattcaattgagacaatctttcaaattcctacatcaatattatatgttttctcaaaagactataatgaaatttatatatgtaaaactatcttaattatataatcaccagataatctattattaaataacaaaccactctaaaatttagctgcttaaaacaaccgttttattcgcttacaattctgtgagtcagcaatttggactgagtttagtttggtagttctgctagtctcccctgaggccacttgtgtagctacaatcatctgacagctcaaattaggactggttttagggatctgagctattataaaacagctcttctttgtttcatgtactcttgtcctcagacaagctagttcaagcttcctgcaaagtctcttgagacctaggctctgaaactctcccagcatcacttctgttgcatgcaactgttgaaagtaagtcagggccacccaggttgaaggatgggggaaataaaccccatgtcactattttctctatggtttttaatacttaggaagctgtcctatatatgttagcaaatccatcaagctggagtattcacgtattctctaatagaaagtcaactgactcctgtccccctgcccacccccctctaaaaaaaagcttttgggctagtgggaaactgttggggaagaaacctagggcctttgcatgttactctgaatggtaagaccctatcttccctggcagcttcccattagcccgatagacttttttcttttctctcttttgtgatcttggctcactgcaacttccgcctcctgggttcaagcaattctcctgcctcagcctccctagtagctgggattacaggcacctgccactatgcccagctaatttttttttttttttttgtatttttagtagagatggggttccaccatgttggtcaggctggtctcgaacccctgacctcaggtgatccacctgccttggcctcctggagtgcctggattataggcatgagccactgcccctggccctgccaagtgacattctcttagagaacacataaatactccagcttgattgatttgctaacctatataggataacatacgtatttgtgtattaaaaccatagagaaaatagggccaggcacagtggctcacgcctgtaacttcaacaattttggaggctgagatgggagaacacttgagcccaggagtttgagactagcctgggcaacattgtgagatctcatttctactaaaaatttttaaaaaactaaccaggtgtgttggtgcacacctatagtcctggctacttgggaggctgaggtaagaggatcacttaagcccagaagggtgagacttgaggctgtagtgagcagtgattgtgctgctgactccagtctggatgacagagcaagaccctgtctcaaaaaataataaaaataaaaataaataatatataattaataatatataattatatatgatatataataatatatcatatatataaaataattttaaaagaaagattaaaaaaacttcagtgactgagtgacataccagttactgtgataaaagcatggggaattgccgggcgcagtggcttatgcctgtaatctcagcactttgggaggccgaggtgggcggatcacaaggtcaggagatcaagaccatcctggctaacacggtgaaaccccgtctctactaaaaatacaaaaaattagtagggcgtggtggcgggcgcctgtagacccagctacttgggaggcagaggcaggagaatggcgtgaaacccgcgaggtggagcttgcagtgagctgagattgtgccactacactccagcctaggggacacagagagactccgtctcaaaaaaaaaaaaaaaattctctgatttttcaggaacttacagtctagttattatagcctagctttgctgtattagggatgtttgttaccagggataccagttaagaaattgtcacagtgatccaggtcagagatgttggtattgggaatggataagaaggttttaagaaacattaaagaaataatatgtacatggcgattgatgagttgatgggtaggggtgtgagaaaagagagtagtcaaggatgattccccgtacgtgtgtgtgtgtgtgtgtgtgtgtgtgtgtgtgtgataggagtcttgctcttgttgcccaggctggagtgcagtggctcaatctcggctcactgcaacttccacctcctgggttcaaggaattctcctgcctcagcttcctgagtagctgggattacaagcgcccaccaccatgtctggctaatttttgcatttttagtagagacggggtttcaccacgttggccaggctggtctcgaactcctgacctcaggtaatcctccacttcagcctcccaaagtgttgggattacaggcataagccaccacgcctggcagttccccatgcttttatcacagtaattggtatgtcactcagtcactgacaaagagaacaaaaggtttggtggggaggagatgaacatggatgacttagtagtcaactggttatatggccctggcactcagaagagaagtctgaacttgagagagagatttggaagtcagcaggatctagttggtagttgaaaacataaaaacagatgaaattactcagggaaactttctagggaagagaactggggaaggaattctaagaaccaacactattccaaggatgaatagagaagaagaagccctcaatagatatgggcaaggagtggcttgccaatcattggacagtatgttgtatagaacctagaaaagggcagcttttgtaggagtaactttaatattattaaatgctatatagaaagaagtaaaataagaattgagatatgactcttgaatttcataaggttcttaatgtgcttgttaagaattattccacaatagtggtggatggaaacagggacaaggattgaatgacttttttagatgagacaagttggagacaaatttctttcagctcctgaacaaagatttaagcatgccagtggggaaagaactaataatgaaggacaagttgaagaaacagaatattagtgccaccctctaaaatgtcttaatttcatcatattcctgaggattctataggatagtatttaacaacctgaaacataaatttatcaggcacaggttagattttctttccattgtgattatttgtccctgcatcccacatgattatttgccagtcagatttgtgtgtctcaaaataactggacaagaggagtaaacttcctttataaaaatgaaccattattgcagcaagaggactgatttcaaaagatgacctggaaaactgtttagtcttgttaaaatatttggcctcatcttcaaaatgtatacatgaatctttcattttgggattgaaatatctttctgatttagaaaagaagcttgattaagaaggagatgtcaacttttacctcccccgcccccaacaaaaaaacagtttcagaaatttatgattaatttaaaagcagttaagataataaagcaaacaattttgtaaaattttttgagggtaatgagtaaactggaatgctcaatgtatactaaaaatactcctgatcttagtaaccagtttttattacatccttagtgtttgtactaacactaaattggtgattataaatttatttacttgatagtatagtatatgtaatattcaacagagtgttaatgcaaaaactgaaaaaattaaaacattttgcttttttgcttaatcggtaaattttcctttctactacctttaaagatggtgcttttggctgggcgtggtggctcatgcctatataatccctgcactttgggaggctgaggctgatcacttgagaccaggagtttgagacctggcctacgtggtgaaaccccatctctactaaaaatgcaaaaattagccaggcatggtgttgcacatctgtaatcccagctactctgcatgagaatggcttgaacctaggaggtggaggttgcagtgagccaaaatcgtgccactgtactccagcctgggcaacagaatgagaatctgtgtcaaaaacacaaaaacaaaaaaagatgatgcctttgagtctggtcacatcattctgccacctctttgataattaatgagggctaatgccctctttagtgtagcacatttgtatataatgcataacttgaacctggagattcaaactacatacgtaaagttaaagactgtcttactttctcaggcactctgtttcaaactcaggtcaggcggcttctccatgaatgattttgtcctttcttactacttctcctcaatctggtattaggttggagatagaaatttttctttttgcctctgaacgctgaaaaagtaagcaacctgaattaaccccttgaactttcctccacctttctttatcaagttctatttttcaagctattttttccctctaactcagaagcccttctctttatgcctgtcccaagtatttatccatttgtactaacataatcatattaaattatttacatccaggattttgtatatatagggttacaattcagtccatacattttgggaagatgtatttttacaatcaaaactgggtctttgttcacaagatattattgctggaaaaaccttgagcctcaaattttagactctatttccactgtaaattagttgatgctctgctgaggattaaaaaattaagtgttataataggccttcattagttttcttctttgtgtttttatctcctgcttctagcttcatttttcaaggcagtgaaacattttctcttctctgatgtggccctacatgctggttgctatggaaatgttccagagaaatgaaaaattaagttaaggtcaagaataatgagttaaaatctcatctcatcgggcatagtgggaagagagccaagattttcttcttacagacagtgtggttttgtttgataaaaacatttttcacaggccaacttatatttcagatatgtaagacctggtgttaatcccagctcaacagtttattgatttggggccgttacttaatgccgccaaacctcaagttatcttctgtaaaatgggcatagtaatgcctcagaggagtgcctggctcagagtagatagttgaattttaatttccatttttctctctctaaatcaggaacatataaaatgaacctataataaaggagatggtaataaatgtgtcatatgtttaaatgaaatcttcacagcaatgtaatttagctatttaatagggctattgctgtgctcatagaacagattcgaatagtttctatgtttctacattattacttaacatttttgaaaactaagactattaaaaagcccttaatgactattttaacagctttattgaagtataatttacataccatagaattcacttattttaaatacacaaatgatttttagtaaatttacagagttgtgcaaccattactaccatacaattttaaggcatttctgtcactcccaagagctcccttgccataattactataaacttttattcgtgtggtggcacaaattatagagtttcaaagtaccagcctgggagtttggctgtcctgagtttgagtcttagtcgtgccactttctagctttgtgacttgggtactttggtttccttatctttaaaatgggcataataactacattacagtgttactgtgaacattaattagatactgtatatagagcactgaaagtataatatcctagtttttgcttcacaaatgttggttattggtggtagtccacattgtggatatttaaataagagaaacatctgaaaacacctagcacagtgactgacacatgattgattttcagaaaacaaagctgttctacgtctttccagatgcatcatgtcatcacaattttgtctgtagttgctcattgacaatgttttaatcatacttaaacatcgatgctcacaatatgtagttatttgttattttgcagaggcatacatttgaatttaacagctaagggagctgtaagacttggagtttggtatctacaaactagttacttagctggtggacccaagcaagtagccttgttgtttataattcatatctttctttctctctctctcttttttttttttttggtggagttttgctctcattgcccaggctggagtgcaatggcacgatctcggctcaccgcaacctctgcctcccaggttcaagtgattctcctgccttggcctcgcgagtagctgggattacaggcatgtgcctgctaatttttgtatttttagtagagacagggtttctctatgttggtcaagctggtctcaaactcctgacctcaggtgatctgccaacctcagcctcccaaagtcctgggattacaggtgtgagccaccacgcccaacagtttttttttttagagatggggtttctctgtgttgcccaggctgcagtgcagtggtgtggtcatagctcactgaaaccttgaactcctgggatcaagcatacctcccacctcagcctcctgagtagctgggactacaagtacgtgccaccacactctgctcattttttattttgcttatagagacaaggtcttgcctttttggccaggttgatctcaaactcctggtctcaagtgatcctcccacctcagccacccaaaagtgctgagattgcaggcgtgaaccacagcacctagctgaaataatttttttattttgataataagatctttatttctttgttaagaaaaaaaacctgagtaaagtcaaatggtaatattagtgataaaagtttagagatttaagaaagtggtggttcttaaccagaatttagacattgggataaattaatagtgaaatgtcagatgtgatattctgtactgtagcttcagtcaatgccatgaacaaggcatataactgaataaagcagtcttttcagtgttttctgtgagcactctttagtggtgtaaaaatgtgtatatataattggggaaattatatggtatttttgaacttgggtcttaggtcagacccttgaactgattgctatttaattatcatgtatattctgtattagcaattatcaacagtaaaatctcgtcatttttgtaggagaggtgtccttatttaaactggtggggaaactaatcattgctttcatacttgagcagcagtgtcactcttttgaatctttttggaaataaagagggctcatcatttgtcttctgtttcaattggaaggttccaatagaaatactcctaatgaactagatttggcctgacccccaacagtttatctgcaggccttgaatgcatgtgctttgattagtagaattatttacagctgtttttgttttgtggcccttttttagtttgctgacatacctttttctgaggaagttcaaaaaatctggatgttggtatattaataattttatttcatatgtttacttttgactgaaagaatgcttattgtatttagtaaatcatgtcttttgtggtttagatacatgttgtggttgaagagtatataaactgtctttgagaagcttggagaatgtttggaagaatgcgtttagagaaagatacttaaagaatgaggaaatggaaattcttcttagatctatgatctacaattaactgacactttgagtctcaaaaaaatctttgccttgtgattttttaagtcctgaaatagggtcatctaagagtgactttctgttattaatcatcaaatttcccagaaaaagtcaaggtttaatattattttccccttggtctctcaaacctgtatttatggtcaaaataatgcttttatttttaatgaagaactgattgctgatttttgtatttttattctatcaagttgtttatagttgtgtcaaagaactattttactagaaaatttaagagattaacaactacataccttactttacaaagttaatagagatggaggtgataaacaaaattaataaaggaatgctaattctttgaagggataagttacaaactattttaaggttcttaaattttgaaaagaactaataagttttgatatttggctatctaaatgtgtaaaagaagattaataatattaggacaaatgttttgaatcgttttagagtgattatcttaagaagcttaaattgtactctaagtgtactctagctttgtgttactctttcaatttatttgtacttatataagtaattcatgattacatacttttgtaagttgcccaactgtgtaactgccattaagtttttttgtcttgttttgttttagacaggtctcgctccgttgcccaggctggagtgcagtggagcaaacatgactcactacagctccgacctcctgggctcaggcaatcctcttgcctcagcctcccatatagctgggactacaggtgcccatgtccagctaaattttttatatttctgtagagacggggtctcacttgattgctcaggctggtctcaaactcctgggctcaagagatccacctgtctccacctcccagagtgctggggttacaggcgtgaaccaccatgcctggcagtgccgttaagttttgttacccaaaaaaaaaacagaattcctttgcctttcaagtaaaaaatgactccacaagaacacagattttgatcaatggaagttttattacttgtcacaagtaaggagagcactgggagtattctccaaagcagtgggtctctgagggaaagtgagaggagggttttatggggcgatggagagggaagagagggtatgtcactgcatgtagaggaggggtcccagtggtgcacatatagtgagtctttatgcccggacgtaggtcacatgctatggtagtgaagctatagcttctcccaggatggagactttagcatggtaacgaggaaagttcactcaggtttatctgtgagtggccagggtctgtgaggaactggttccagctgtctaggtgactgcattctacacagggtttaggcaaaaataggctgcaaggcaggaggctataaaacaggctgattgttcaagttgattaattcctatagtccatgaagaccttgctgtctgcttacagcttgttgagtgtcttttcagacctttttcttccattcatttacatatattaatacgtagactaatatgtaagggttcttttccctcagcacaaatgatgtcatatatattggtcttcaaggcttttttttttacttaatgtattttgagtctctttccatacattttcatagcactggtatgtctctgtttatctagagtgcaacggcgtgatttcggctcactgcaacctccccctcccgggttcaagcagtccaactgcctcagcctcccgagtagctgggattacaggcgcccatcaccacacctggctaatttttgtaattttagtagagatagggtttcaccatgttggccaggctggtctcaaactcctgacctcaggtgatttgcccaactcgacctcccaaagtgctgggattacaggcgtgagccgccacacccagcccaattttttcaattgcatcgatttctggtcttttaaatcttattataaataccttggtaaagtttattatctttctgtaatatggacaatcactgtaatcaatctgttttccatatttttacatatcaggttttcttaaagtaagcatcatgctggtgtagcagcatatgagtgctttagggcccaagagtgagaaaagacatatagttgttactcttcctagttgagccttgaaggagatcatagtggactgtgtgtgattggtgagaataatatcacaggagaacattgaaaacaataaagtgagtcacctcctgccccttcagtggctttacactactcttcatatagtaaccaaataccatcatataagttagaagatcctgtgttctttggtccttgctaattctttttttctttttctttttttttttttttgagatggagtcttgctctgtcacccaggctggaatgcagtggcacaatcttggctcacttcaagttctgcctcccaggttcacaccattctcctgcctcagcctcccaagtagctgagattacatgcattgtgcccccatgcctggctaattttgtgtttttagtagagacggggtttctccatgttggtcaggctggtctcaaactcctgacctcaggtgatccacctgtctcgtcctcccaaagtgctgggattacaggtgtgggccaccatgcctggcctcatctctactatattctatctagtctcagaatctatggttatgctgtttctttacctagaatctataccacacatattaaacattattcttcccttaactttcgttcagcagtcatctttaaaatcttaccataaatatcacttacctgtacatcagctccaccctaatttggtcaggttgcctctgttatatatgcttgtatctccctgtactttacctacatatcacttaccataacttgcaattatatatttagttatgtgattgctgtttatatgtttagtgaaagaaacagtgcaagctccatgtggacttagaatgacttatcttttttttatcgttagtactgaacacatagtaaagaccaataaaacatttttttgtcatttaactaaattaaatttttcctgggaatggaataaggtttcttttttcttttttttttttttttttgagatggggtcttgctctgtcacccaggctggagtgcagtcacatgttcgtagctcactgcagcctcaaactcctgggctcaagcgatcctcctaccttagcccttagcttcctgggttgctgggaccacaggtgcatgccaccacgcctggctaatttttgtagagacagggtctccctatgttacctaggctggtctcaaactcctgggctcaagcagtcttcccatctcagcctctgaaagtgctggaattataggcatgagccatcacacccagcctgaaaaatttgtatgagtctgtcaagattgtggtataaatacagaggaaacatatgtttatataaattgtttctacttttaaaatattcttatgttgtcaaaagttttgtttgtttgtttgttttgagatggagtctcactgtgtcgcccaggcaggagtacagtggcggatctcggctcaccgcaacctccacctcctgggttcaagcaattctccttactcagcttcccgagttcctgggattacagccatgcaccaccacacctggctaattttttatatttttggtagagacggggtttcaccatgttggccagtctggtcttgaactcccaacctcaagtgacccacccgcctcagcctcccaaagcgctgggattacaaacctgagacaccgcgcctggctgtcaaaagttatttatgtcttgttcagtaattcttccctccctctacccccttccccaacaaagcttttttttttttttttttttttctgagatggagtttcactcttgttccccagagtggagtgcaatggcgcgatcttggctcaccacaacctccgcctcccgggtttaagcgattctcccgcctcagcctcctgagtagctggggttacaggcgcctgccaccacgcctggctaatttttgtatttttagtggacatggggtttcaccatgttggccaggctggtctcgaactcctgacctcaaggaatctgcctgccttggcctcccaaattgctgggattacaggcgtgagccaccatacccagccaagattattttttagatatatttattttttaaaaattagagatttagctgggcatggtggctcacacctgtaatcccagcactttgggatgccaaggcgggaggatcatctgaggtcaggagttcaagaccagcctgaccaacatggagaaatcccgtctctactaaaaatacaaaattagtcaggtgtggtggtgcatgcctgtaatctcagctacttgggaagctgaggcaggacaatcgcttgaacccaggagacggaggttgcaccattgcactccagcctgggcaacaggagcgaaattccgtctcaaaaaaaaaaaaaagacttagataaacttaagagactagggtcctggatggaactttattattaacttcaagtttcctcttaggcaggggactacttcccatctctaaaatgagggaatggaaatagatgttctatcatggctctaattctgtaaaagtgtaaaaagatggattacagtgatacaaatgtggtataaaaagttgtggaataagactggacttgtggttctttttcaacagtttaattgaaaagaaagacactcaatttttttcctttttctttattttcaggttatatttcacactatgtgctgactgtatctacagaagatatttaaaaaaaaaaaagataaactttttttcaaagattttgattccagtggaatctttgctttagatttgtgtgtgtgtttgtgttcgtgaattgtaactccagaagcaatgcctgtacaagctccacaatggacggatttcctctcctgcccaatttgcactcagactttcgacgaaacaattcgaaagcccatcagtttgggttgtggccatactgtctgcaagatgtgcctgaataaactccaccgcaaggcttgcccatttgaccagaccactatcaatacagacattgagctcctccctgtgaactcagcattgctgcagctcgtgggtgctcaggtaggatgggtgacttaatacttttaaatttctccctctctctctctctctctctgtgtgtgtgtgtgtgtgtgtgtgtgtgtgttgtgcgtgtttttctcctgagagaaacctgttgaattaaaattgggtaacattgccttctatttaaataggtataattctgtttggtactgtaaatcctttatttcagcatgttagatttattgtggtagtccagtgctttttagtcatagtacagtaacatccatttaatcttgtcagatattcaataaacctagctatgcagatcgctagagaaacctaaggccgggtgtggtggctcatgcctgtaatcccagcactttgggagggccaaggcgggtggatcatttgaggtcaggtgtttgagaccggcctggccaacatggtgaaatcctgtctctactacaaatacaaaaaaatgagctgggtgtggtggtgtgtgcctgtaatcccagctacttgggaggctgagacacgagaattgcttgaacctaggaggcagaggttgcagtgagccgagatcgtgctgcactccagcctgggtgacagagtgagaccctgtctcaaaaaaagaaaagaaacctaagaggtaagtcataaggaccttttttaacattgagaaaactattgttcataaaaccactgcactttactcagtagagaaggtgcagctgcttcaggcagttttactcagtagacattaactgaaatgaaagatgagaaaggtgacaaaaactatagcacaacatttgggaaccattagaacacacttaatgctttataaacctaaaaatggttgggatggtaaattttgtgttatgtatatattatcacaataaaaaaaataaaattttcccaaattttcctttcatctaaaaggaaaaagaaaaaataaattagactttaaaatatataatcaccaatttctcctaggaatgtaagtttgacttaacatctgcaaatcaattaatgtaattcactatatcagtaaaagttgcaaaattgcacacatatgatcatctcaatagacacagaaaaagcatttggcaaaatccaataccttttcataataaaagcactgaaacaactaggagaaaaacttcttcaacccaaaggacatggatgaaaaacccacagctaacatactgaatggtgaaagactagatgctttttctgtaagatcaggaacaagtcaaggatctccactcttaactatttctgttcaacatcatacaggaccttctagctagggcaattaggcaagtaaatgaaaccggtgacattcagataagaagtaaaaaataaaaacaatctcattcacagatgacatggtcttatatatagaaaatgttaaggaatctgcaaaggaaaagctattagaaacaaaaaactaggcagagttgcaggatataagatgagtatataagtatcagttgtctgaaaaagcaaaagtctttctaaggtgtaaaaatgtgtttacagtgtttcataatttctttctttctttttttcttgctctgtcacccaggctggagtacagtggtgtgatcttggctcactgcaatctctgcctctcaagttcaagtgattctcatgccttagcctcccaagtagctgggattacaggtgtgcactaccatacccagctaatttttgtatttttagtcgagacagggtttcgccatgttggctatgctggtctcaagctcctgacctcaagtgatccacctgtctcgacctcccagagtactgggaatacaggcatgagccaccgtacccagctagtgttgcatactttcatccacagtatgttaataacagttttcttaggccaggcacagtggttcacgcctgtaatcccagcactttgggaggccgaggcgggtggatcacgaggtcaggagatcaagaccatcccggctaacacagtgaaaccctgtctctactaaaaatacaaaaagttagctgggcgtggttgcaggcgcctgtagtcccagctacttgggaggccgaggcaggagtcccagctacttgggaggccgaggcaggagaatggtgtgaacccgggaggcggagcttgcagtgagccgagatcgcaccactgcactccagcctgggcaacagagtgacactctgtctcaaaaaaaaaaaataaataataataataatacttttcttacacacgtaagaaagactgtctggtacataggcccttaataaagactgttaaataagtaatatatatgttgtatttctatacgctggcaatggacaatctgaaaatagatcaatttcatctacaagagcataaaaaaaattaagaatatatttaacaaaagaaatgtaaaattagaccgggtgcagtggctcatgcctataatcccaatagtttgggaggccgaggctagcagatctcttgaggccaggagttccaagaccagcctggccaacatggtgaaaccccgtctctaccaaaaaaatagaaaaattagccaggtgtgaaggtgcccacctgtaatcccagctactcggggctgaggcatgagactcgcttgaacccaggagagggaggttgcagtgagctaaaatcacaccactgcactccaacctgggtgacagagcgactctgtcaaaaaaaaaaaaaatgtaaaactatattttgaagactacaaatcgttgtttaaaagtagcttaaaacttgaataggccgggcgcggtggctcacgcctgtaatcccagcactttgggaggccgaggcgggtggatcacgaggtcaggagatcgagaccatcctggctaacaaggtgaaaccccgtctctactaaaaatacaaaaaattagccgggcgcggtggcgggcgcctgtagtcccagctactcgggaggctgaggcaggagaatggcgtgaacccgggaagcggagcttgcagtgagccgagattgcgccactgcagtccgcaatccggcctgggcgacagagcgagactccgtctcaaaaaaaaaaaaaaaaaaaaaaaaaaacttgaataaacatttactctattaactcaaaatggatcaaaggctaaatataagaactaaaactacaaaactcttagaagaaaatatagacataagtctttctgaccatggagtaggcagtgggtttttttcaagatgtgacaccaaaaagcacaaggaacaaaagaaaaagataagttgaacatcaaaattaaaaactatatttcaaagatacgaacaattggctgttcacagtggctcacgtctgtaatcccagcactgtgggaggccaagatggatggatcatttgagaccagcctaggcaacatggcaaaaccccatctctacagaaaatacaaaaaaaaattttttgctgggtgtggtggcacatgcttgtagtcccacctgtctgtgaggctgaggtgggagcatcacctgagcccaggaggccaagatggatggatcatttgagaccagcctaagcaacatggcaaaaccccatctctacagaaaataacaacaacaacaaaaaattgctgggtgtgatggcacatgcctgtattcccacctatctgtgaggctgaggtggcagcatcatctgagcctgatcacctgatggaggctgcagtgagcctcgatcgcagcactacgctgtagcttgggcaacagaatgagaccctatctcaaaaacaatagcaacaacaaaaaacaaagataccaacaagaaagcaaaaagaacaacctacagaatgtgagaaaacaattgtaaaatcctatttctgataaagacttatatgtagaatatataaggaactcttacaactcagtgataaaaagacaacccagtttttaaaatggacaaagagctgaacaatcacctcgtcaagtagattatacagttggaaaattggcaaaatgaaaagtagctcagcagtttgtctttaagtaattgcaaattaaaacaagtgagataccactacacacaaattaaaatggccaaaatccaaaacattagcaacaccaaatgctggtgaggatatggagcaacaaaaactctcatctttttggaaatgaaaaatggtatagctactttggaagacagtttggcagtttctttataagcttaacatagtaggtatttacccagttaacttgaaaatttatgtctacacagaaaccctcacatgactatttataacagctttattcatgattgccaaaaaatggaagcagttgagatatcttttaataggtgaatggataaacagtggtatatccatacaatggcacattgtataaaatgaaataatgaaaagacatagctgtcaagtcacaaaaagacatagatatatctcaatgtataccattgctaagtgaaagataccagtatgaaaaggccacatactgtatgattccaattatgtgatatctgtaaaaggtaaaaccatagcaacaataaaagtatcagtggttgccatggattcaggagtagggagggaggatagaattggtgaaacagtatttcttagggcagtaaaacagttctttatgattctgtaattgtggctatatgacactctgaatttgtcaaaaactgtagaactttacaaagattatggaagacaatctgaagtatatgaaacaatttcactaaaggggtgtaggagaaaggtagattgtgtaagattaaagatagagaaagatattatctataagcagtgtactctagtcttttcccatgggggtacgaattaattctgatactgctgtatgtataatacatattagaattgaacagttaagtaagtgaatgggaaatgattggagccagttaacagataaacaaggaggaagaggttagagtgattcatgtgataatggattggagttggaggcatcagtatgaactcatttttagcttgatatggatacagatggttatatacagaaatagatatacgagatatctcgtgtgtatctcgggttattacaatgtatatctcgggttattacagtgacatatttccttggtctgtcatctaagatggcctagaaggaacaacaccccaatagtaatgtgcatacatagcattcatatcttggtttctaataccattctccaataaaaggaaccagagttccttggagaaatggctaattctaagactgggacaggaaatacacgaaatgagtctggagtagcttgtagcactggaaagtatagagaagtattcaaaacacacacagacacatacacagagtaatgggggctatatcaaaggcacacaggagccaactgaaagagctctcaatggccaaagctaaaacagtttgaacaacaaaataaatggaattggatcataacccaggtataagataaatatccttgagtctacacgatacaattaaatgattgaataaatagatggaagaaagaaacaaatctcccgtgcagaattccaaattaattacatagatattctgctctcaaggatgtagaatgtgtgtgggctacgcatagtgactccttccaaaaagtacagtttgtggagattatgtaactttatagtggagaaacctggtaaacactgactaaaccagctgttcaaatttaacatcagcaataataagttgtgttggtggtgtgtagctttgatatgatgtgataaaaaatggcacttttcccctatgatcttccaaaaatccataaccccaatatactcatgagaaaaatgacagatcctagatcccagtttaggggcattctacaacataccagaccagtgctcctcaaaactgtcaaggtcattaaaacaaggaaagtctgagaaagtgtccaagccaagaggagcttaaagagatattgaagggctagcgcagtggctcacacctgtaatcccagcgctttgagaggccaaggcaggcagatcacttgaggccaggagttggagaccagcctggccaacacagtgaaatcctgtctctactaaaaatacacagaatcagccaggcgtggtggcgcatgcctgtaatcccagctactcaggaggctgaggcatgagaatctcttgaacctgggaggtggaagttgcagtgagccgagattgtgccactgtactccaatctgggcgacagagtgagactttgtctcaactttgaaaaaaaaaagagggagagacatggagggagagagggaggccaaggtgggtggatggcttgagcccaggaattcgaggccagtctgggcaatgtagtgggacctccatctctacaataaaatacaaaattagctgggtgtggtggcgtgagcccagatgctgccacggcactccagcctgagtgacagagcgagactctttctctgaagactaagtgtaatatggtatcctggatgggatcctgaaactgagaaagaacattaggtgaaaactaatatctgattaacatggattttagttgttaattatgaatatgttgatattggctcattaattttaacaaatgtaccataccagtgtaagatgttaataataggggaaattgttagtcgagtgtggtggcttgctcctgtagtcccagctacttgggaggctgaggcagaagaatcgctggaacccaggaggcggaggttgcagtgagccgagatggtgccactgcactccagcctgggtgacagagggagactccgtctcaaaaataataataataataataggggaaactgaatacaggataatgagaattctgtgtactatctttgccatttttctgtaaatctaaaactgttctacaaaataaagtttactaggcaaaatgggcaaaggatctgaatagatattcttccagagaagatatacaaatggataataagcatatgaaaggatggtcaacatcattagctatcagggaaatacaaatcaaaaccacagggaagtgggaggaaggtagatgggaagaagagataattatcaaagaatacaaagcttcagttagactggaggaatgcctttagtgatctattgcacagaacagtgactataaatagtaatacattgtatgtttcaaaattgctaaaagagtagattttatttaaaatctacaaaaaaaaagtgaggtgatggatttgttaattaacctgatttagtcatctcacatcgtcacattgtaccccataagtatatgcaattattattaatttaaaataaaatttagacaaaccacaatgaattactacttttcacccaacaggatagctataataaaaaaagataatgagtagaagaattatctttctacataaaatgtagaagaattggaacccttatacactcctggtagatatataaaatgctactctgcttttggaaaatagtttggcagtttttcaaaaggttaaatacagactcctaggtatataccaaagagaaacaaaaacttttgtctacacaaaaacttgtacacagatgttcatagcagcattattcgtagtagtcaaaaatagaaacaacctatatgtctgtcaatgatgattgtgtaaataaagtgtgatatatttatacaatggaattttattcagtgatgaaaatgaatgaagtactgatacaacctggaagacccttgaacacattgttaagtgaaagaagtaagtcagaaaagactatttattgtattgattttgcttatatgaaatgtccagaataggcaaatccatagaaaatagattcgtctttccaaaggttggtggatggttgggaagaaataaggggtaattgttaaaagggtactgtgtttctttttggggtaatgaaaaggttctaaagttgattgtggttatgtttggacaactgtgaatatactgaaaaccagggaattgtatgtactttaaaccagtcagttgtatggtatgtcgattatatcttaattaggctgttagagaaacaaaacaaaggaatgcaaagatacatgttaataggaaagatcttttgaaagaattcagtaaatttagtgggcgttttgatgttaccagtgtcagcattatgagtgcataaactatactaaataaaacaattaatgaattgagcactcatacagatcttttcttttggcctccaggtccctgagcagcagcctattactttgtgtagtggggttgaagacacaaagcattatgaggaagccaagaaatgtgtagaagaattagcattgtacttaaaaccgctcagcagtgctagaggtaagtttgtttttgtttcttatttaaagagtaaaactgcttttttaaatactcagtacataatcctatataagtcctgaggaattcccaaaaaacctaactagaggtaaatttgatgcaattatccatactaagtaaatgtctactaaagagacttgttaccataaaaattgtgagctattaagcaaatgttaatgaaatttatctattgtaaactaaactcattttgtgctaaatatcatgacacaaaccacatcaaataaaatagtgaatttttagtttatgtgatgatggaaacattattcgaatgatgataatagcaaatataactacttacttcagcagtgctttccatcatttgacaattctgaatggtttgccttctatccagttttatatgctatgctataggcggtataatgaatacggaagttgccattactgcacagaaagggcttgctatttaattaggaaaataaggttaaccactgtcaaataatataccagaactcttaggacttcaagatttacattataaactaattatcaatgttgtctagtccttttttctttcttcctctatgattaaaatgagtaatggtatatttaatgtcataatgaatgctaagtgcacatgagataactcatgtatacatttgtatactttaaaaatgtatacttaagtaagctttacatgtgtggttttatttgttgcttattttaaatactctagtagtcccagaactagtcacatacccacaagttaacccaacagaagaattgctcctggactgtaaaattgcattgtgaacctaggaataacttctttactcttttaaaggagtgggtctgaacagcactactcagagtgttctgagtcgcccaatgcagaggaagcttgtgactctagtccactgtcaactagtagaagaagaaggcaggattcgtgccatgagggcagctcgatctttaggtgaacgaacagttacagagctcattctccagcaccagaatcctcagcaactctcttccaatctttgggcagcagtaagggctaggggatgccagttccttggaccaggtacataattaactttaggtatttattctgctggtaattctaaaagtatgatgtaggaattataagtgatgtacaaagcctagttctttgcagtattttattgttaccaactaatatcttgtttgatgttcatggcttgggcaattccatgtaacttagtggacttactaggtgaacttagtgaacttaaaacttttctcttaatgccaaaagttgtttctttttttaattttttgatttttcctttttttcacacctgtagcaggaagttcattcattttgatagaagtttttcttaaatttattaatcactttatctgttttctttataaaatatatagaatgtaatacaaaattgctcacaaaaatggtgtaaaagtgtgttgctggttaatcttaactgtattgccagttaattgaatagctgcagaaatgattaaatattccccttctaataaatggatttatcttatctatgtacttgataaattttggttttgcccaactttccctagcaatgcaggaggaagctttaaagttggttctgctggccttagaagatggttctgctttgtcaagaaaagtattggttctgtttgtggtgcaaagattggagccacggtttcctcaagcctctaaaactagcattgggcatgttgttcagctcctttatagagcctcctgtttcaaggtatgaacctacattaaagctcagcttgaaaggaaatattgttctttccccaaagttaagtagtaaaactttgagtttaataaagttgcctgtatcttttcagaaaatctcagcaatttttctttattcttttaaagaatgtagatggggtcttattatagttaaatactattatattgaatttttgtatgttcaatattgaacaacatagatcaagtcaaggtttatagatttttgtatttgaagagactaagaaactatatcaatttcttaccaagactgtgcagaattggtctgaagagagagttattgaagcacaaataaattttatttatttatttttatttttttgagacaaagtcttgctgtcgcccaggctggagtgcagtgcatgatctcggctcactgcaacctccacctcctgcgttcaagcgattctcctgtctcagcctcccgagtagctgggattataggcagggccactgcacctggctactttttgtatttttggtagagacggggtttcgccatgttggccaggctggtctcgaactcctgacctcaggtgatctgcccgcctcagcctcccaaagtgctgggattacaagcgtgagccaccgcgcccagccaaataaattttattcagagattttctcctagtgtaattccacatatacaataatgaagttccatttgccatttcagtttatatggtaatgctggacatagtctcttatcccaaattgaataagcaccgcctcaaacattgctactcactatgtatcatttattgtacatccagtattatttttctgacttttttttttgagatgcagtcttgctctgtcgcccaggctggagtgcagtggtgtagtcttggctcactgcatcctctgccttctgggtcaagcaattctcctgcctccagccttctaatcataatcattatgattattctagtctagcatctcacactttacactttctggtagtagcccatcccacaaaactccatgaagaattaagccaagtacaaattaaatcatttttagaattacaccagcatctgaagctctacagtcatcagtcccacctagctcattgtcaggcaatcccaagagtcataatccacatttatggagaagaaacatattgtttttcagaatatagaattgtattagtatttttttcttttcaaaaatacatatacacacacatacaccttaaactgaatgtatatgttaaagtatgtcaaatctttggatttcattccagcacatacagattgactatacaaaaatccaaaatccaaaactttttgaacaccaacatgatgctcacatgctcattggggcatttcagattttcagagtaaggatgctcaagtggtttaatgcagatattctaaaatttgaaaaaatctgaaatctgataacacttctggcccaagcattttgggtaagagattctcagcctgtatttattctttctgaaagacctatccagaaaatgttggcctaaatccaacttgactcagaatgggatgatagcaatatacctacctcaacaagttaaggagaaaatattttgcaggcaaatggtatattcatttaatcttgctgttgatgctaaatttgttacattaaaaattatatgttcatataaagcataaactcatttttttgacttcattatgagattatttgtgtcttattaggtcaccaaacgtgatgaagactcttctttgatgcagctgaaagaagaatttagaacctatgaagctctgcggcgagaacatgactcccagatagtgcagattgctatggaagcaggcttacgaattgcaccggaccagtggtcctctttgctttatggagaccagtctcacaaatctcatatgcagtccattattgacaaggtaggaccttttttgttccttacttcttagactaatcttggcattttggtaattcatttaacaaatgtatattaaagtgaatactgtatagcttttgtaaattgtatttatagccagtgtcatgtcataaccaatcacgttataataccactttgttcatttaaagatttgattagtttatattttttattttacttattttatattttattgtatttttactagaatcacagagatgaaggccaactctagagaccactctacatttaatttagagaaatagagtcaaatagtaagagtaacctaaaaaaaaaataatgaacatttactaaaatcttaatatgtatctagtggttttaaataattcatttaatcctctcaacagccctgtattatccattttagacaaagacaaagggaagttaatatgtttttccagcatcacatagataataaatgacagaagtggatttgaacttgaccattctcagtgtagagtacactaaccttttaccagactattcccccccaccttttttttttttttttttttcctatttctaaagatagaattccttgaatgggtaatacagtgagaattgggaaatatgttttttaaatgcttggtgtagggtgggcacagtggctgatgcctgtaatctcagcactttgagaggccaaggtggggggattgcttgaggccaggagttcagtcacagcctgggaaacattgggacactcatctctaccaaaaaaaaaaaaaaatagccaggtgtggtggtaggcgcctatagtctcagctacctgggaggctatggtgggagaatcccttgagctcaggagtttgagggtgcagtgagctatgttagcacctcggcaacagagtgagaccctgtctctttaggggggataaaaaggcggtacataattttcagttacaatgtaggttgtttgctctgctctataagtcttccctggatacctttaaccagactttacctgcaactcttaggtttggacaggagcttgtatcggaagttttgcaactcatttataatttacggaaacgcttaacgcttagtaatgatctattagaggagtacctttctacctctgaagagaaacttggctttttttgtttgtttgtttgtttgagacagagtctcaccctgtcacccaggctggagtgcaatggcactatctcggctcactgcaatctctgtctcccaggttcaagcgattctcctgcctcagcctcccaagtagctgggattacaggcacgcactaccacaccctgtaccacgcccaaattttttgtatctttagtagagacggggtttcaccatgttggccaggctggtttcgaactcctgacatcgtcatctgcccaccacagcctcccaaagtgctaggattacaggcgtgagccactgtgcctggcctggcttggcttgtcttttataaagattctacaaggtggttaatcttgtctgaactgaactgtgtaactaggtgtatatcctacagtaattttctcatatcacacgcagtgctttaaatttaatatccagagacctttgcacaacaaactggtaaactttgcagtgtgtgtgatattttatagagcaatagaactttctgtaatcatgaaaatgttctgtgtatgcactgtccaatatggtgatcactagtcacacacggccattaagcatttgaaatgtgacttttgcaacggatgaactgaaatttttatttcatttaattaacttaaatttaaatagccacatattgccaaggtcaccatattggataatagaaaagagaatttattaaaagcgatgaggaaagcactaattctagtaaattaatggggagagaaacaggaattaacaattcacaaagaagactcatcagtatatctaattgatggtaggctgaattgagagaggtctcacatttgaagaatgtgacagcagaggcaatacagtacacaatgtgccaagctctggatgcagagaagtacagaatttatttgggtagcaagtaatctactctggccaaagtgtagggtatatgggaagataaaaattaaatttaataaatcgcaaaaatgattgtgatataaataatctttatatttaaaggattatctgacctttgggaaagttaacatttatcttttttaagttgcagactccagcctcttttgcacagagtgttcaggaactaacaattgctctccagcgaactggagacccagcaaacttgaaccgactaagaccccatttggagctgttagcaaacattgaccctagtccaggtaaacccacgggaaattaatggactatcttatatgtgcctttcgtgctgctcaatgattctttaattatcttttgttgttcctctagggtttcccaaagtagttactccagatcttttttacagtattttaagtttccattttaaatcttttccctctttatctcaggttagttcactttaatatttatttaatactttttatactgttgctcatttcatcaggaaaatagatttctctgggcttctttatgtttcttctttctcccgtcacaaaattgtgttgtattttaccattcttacctcttccaaatctcgtttttctcatttttttctgtattatgtatccttagttgcatttccttgatcctgtttttgccctctccatgatatcttgttccttcaagtatcctgtcttgtatatctttacttaggctttttctgctccttctccgtaacctgaaaatatacccaaccttcatttttcaacttgcacttacatctaagttattttagcttctctgtgtttattcctactactgatctgaagctctcttaatattcactagtagattcccagtctctgattccaaaagctttgtcttagtctttaaatcactcccatttgttttcagcatttcgataatgttgttgagcacttttttgatatctttctgtgatctcatagttctcttctgacctgagtgctacttctgtcttatttgtaccatgccttcccctcctgcccactaaagagtaggcaggttatgctcttggaattttgttttctctacatgctctgatggtggttattcattcttagcatcaggtattaccttagtgtagaatacagactcccaaatatctctatcactattatctctgcatcactccagatacatctcccagtgcttgctgagattccccatcgtgtcctctgagtgcttcaaagcaagctcatcatttcttgatacttgctcttcctttaatgtttcctctttctgataatgacctcattctctgaggtatgtaagtttaaaaccttaatgttttgtcttgtctcatcttttcctttcacttgttctacatactgtttcatacaatgggatttatctgttcttctttcacaatacccctatatcccctgcttataattaattcctttgagagcctcctttttcctgagactgaatgtcttccaagttcctctactatgagttcctccaatccagtctacttactgctgtaaaagaaatcacatccctggcctgacacagtggcttacgcctgtaatcccagcactttgggaggccgaggcgggcggatcacgaggtcaggagatcgagaccatcctggccagcacgatgaaaccccgtctctactaaaaatacaaaaaaaattagctgggcatggtggcgggcgcctgtagtcccagctactcgggaggctgaggcaggagagtggtgtgaacccgggcggcagagtttgcagtgagccgagactgcaccactgcactccagcctgggcaacagagcgagactccgtctcaaaaaaaaaaaaaaaaagaaatcacatccctgatcttccttccacactcataaactttcattgtttgtagaattgcttacggaataaggtttgacactcttgactatggcattcagagccctcttagttttttatcagcctacttttatagatttgctcccaaaattgcttagtaaaccagatcaatgttactagaatatatagtgatttttttccctgactgctgtcctttgatcatcctgagcagtcaaaagagaactttcacaagttcctaaaccatttttgaccccatttctcatctacctaccacttcatttctttttttggcacactcttgaactcaactccagtcaggcatttatctccactgctctatccaaacttattttgtcaaggtcataaattacttccatgtagctaattccaaaagtcagttctcagttcttactgtacttgatttagcagcatttaactttttttttttttttggagatacagtttcactctgtcccccaggctggaggcaatggcaagatctcggttcactgcaacctctgcctggttcaagcaattcttgtcccgagtagctaggattacaggcttgtaccaccacatccagctaatttattattcttattattcttattatttatttttagtatctttagtagaaacagggtttcaccatcttggccaggctgttctcaaactcctgaactcaggtgacccgcctgcctcagcctcccaaagtgctaggattacaggcatgagccaccatgcctggccattgttctgtactctctcttccttgaaatgcttttttcttggcttctaggctactaattctcttctttattggactctcctcagcatcctctgctttctcatcttcatatcctgtactctttggagtgttctcagagtttaatcctatatctgtttcctagataatcttatctatcccatagcttcaaatataatttatgtaactcacaaatttactgtatttttttttttttttttttttttttttttttttttttgagacggagtctcgctctgtcgcccaggctggagtgcagtggcgggatctcggctcactgcaagctccgcctcccgggttcacgccattctcctgcctcagcctcccaagtagctgggactacaggcgcccgccactacgcccggctaattttttgtatttttagtagagacggggtttcaccttgttagccaggatggtctcgatctcctgacctcgtgatccgcccgcctcggcctcccaaagtgctgggattacaggcgtgagccaccgcgcccggccaaatttactgtatttttatcagttctgaggttcataattatttcagatcttagcatttctgaaattggaatgcatttgtatgaagacatattataattaacaaccttttttttctttgttggcacataaagtagtacgtattacaattgatagtcttttagaatttgaaatatatatccagcccatgcctttttcctgaacttgtatataaaactgctttctcggccgggtgcagtggctcacgcctgtaatcccagcactttgggaggccaaggcgggcggatcacaaggtcaagagatcaagaccatcctggccaacatggtgaaaccccgtctctactaaaaatacaaaaactagctgggcgtggtggcaggcacctgtagtcccagctacttgggaggctgagacaggagaattgcttgaacccggaagatggaggttgcagtgagcagagatcatgccactgcactccagcctgatgacagagcgagactccatcaaaaaaacaaaacaaaactgctttctcagcatctatcatcttatatctgataagcatttcaaactgaatctatctaaaaatgagctctcccctgccatcctgtttgtggcaactctgtcattccagttgcttagtccaaaaacctcttctttctctcataatgtatatctgatccattagcaaattctgtaggccctacctttaaaatccatccagaatccatttaccttcactgctaccatccccatctctcaggggattatggaatagcctcctgttgtctgtctgattttaacaaaagagccggagcgaccctgtcaccctctgctcataaattctcctgtggctttctatcaactcagagtaaaacccagtatccttcccatgatctatagggcctcatgtgatctggtcttctactacctctctcaaacctcatttcctaccctttttttccacttaattccctcctctctgattccacctccatgcaacatgccaggcacacttcttacatcaaggactttgcacttattcttccctctaacttggatgtttttcccttggtatattattctgcatgtcaagaagaattagttacagaatattctttgattatagggccttttgtagtttttgtggtgtgttgtatggaaacatacatatagctgtattgaacattgtacaaaacaaatattagaagataatttatatatttgaaagtctccagtaggcacacttaaacccttctttcaggtctttaatcaaatgtaaccttctcaaggaggacttttctggcctctgtctaaatttttttttttttttttttttttttttttgagacagtctccctctattgaccaggctggagtgcagtggtgcaatctcagctcactgcaacctccgcctcccaggttgaagtgattctcctaccttggcttccggagtagctgggactacaggcgtgtgccaccatgcccagctaatttttttgtatttttagtagagcgcagtggctcatgcctgtaatcccagcactttggaaggccaagatgggtggattgcctctgtctaaaattttacacattggccccacttctcttcttagctctattttttgaattcaacattatctaaatactactgtatattttgcttatttgtcttggttattatctggctcttctccttgaatataatggggatttttgttttaatcactattgcttacccaacaactagaacaataactcagatttagcaagtgttccaaaaactacttttttgaatacttgttttcttcaccttttttccttttcagattccatgtgtccttcaaagcccagttcaaatgccatcccctagaattctttcagggtgtctgagcaagaagttatctctacatctctcttcttgtttcattttacatatttcttttaaagaatatatttagccttatagttaatttttcttttataaatcatagtgctggcactgggcaaatacctactaaatgaagaaaacatgtagcagagttactttatatgatagttcttctattaaactttttttttttttttttgagatggagtttctctctgtcaccaggatggagtgcagtggtgcaatctcggctcactgcaacctccgcctcccgggttcaagcgattctcctgcctcagcctcctaagttgctgggactataggcgcgtgccaccatgcctgggtaatttttgtatttttagtggagacggggtttcacaatgctggccaggatggtctccatctcttgatcttgtgatctgcccacctcggcctgcgaaagtgctgagattacaggcctgagccactgtgcccggcttattaaactttttaagctttttgtttaccaaaactttatttatataaaagttcaaaataaacatgcaaattgactaactgtagacagtcctcagttttgtttaatccacacagtgttggtctgagcaatggtctaaatttcttagatgccaatattttaaaactgggaaatttttacttaaaaatctcaagtttcaggtttccctgggaaacagtgaatgtatctggcagtgccagccttgcatcatcacataacaacaatcatctaaagctgagttataaccatactcttagatgagggacatgctccccagttcagcagtccctgtcactcgttgttgtctcctcaacactgagagtctaatgacagttaccactattgtgtggcctatttacctctttcatgttacctttcttgttcctatggttatttcagtttgcaaccccagctttgaaagaatatgtccattcctttaaaatgatggttaggtgaataagctattatctaaaaagctaaggtgtgaagcttgatttcactgaaatgttttcaagtaactcttttattaatttgatattagggaaaattttgagtaacattagagtttaaaacattatcattggttgtatagatgctcctcctcctacttgggaacagctggaaaatgggctggttgctgtgcgtacagtggtacatgggctggttgattatatccagaaccacagcaaaaaaggagcagatcagcagcaggtaaggaagctgtttaaaacttagagttaacccactgtggatatgccttaaaactataggtaaaccactgtgggtatacctacagatacaaagccaaaaagataacatgaacattttgagactctgagtatagaaactgtaaattaccttggcatggttaacagtttactgcattaggctgataactttatctgacaatattgacattaaataatccttattgatctgatgtcatgctggggtcagtcttcacattggatatggcagcatttgatggagaaaatggattcagtgctgaagtttattccatttatataagattattattctctttagtttgtttaacattttggtttgacaataagtatcactttttagtgctaatactgtgtctttccaatactgttcaaatttctatagattttcttattaatattttaagatttttttcattcataatgtcttatgccattgggccaaatctccctcaaagtttttagatgaaaatacgatggtagaatataataacttcttatagctagagttttaaattttattcccagtaattttattttgctctcaggatttatattaggttcattagatcttttattttgcagtagtaagcctgtgaacgtaaaactcttaatttacctggttcaggtaaatataaataggttactcagtattcctttttgcttaagaggcaagaaatataaaaattatcctgctaagtaaaataatctggatatgattttcctaacctatctaacacaggtcaaagctttatttatgaataggcataaaagaaaggagaacctacagtttttaactctctgtttcattagacatcttgaagaaaataacaagagtaatgagactaacctttaaagtctgccatatagtgataaaatacactaaattttgtccagtttagtgttgtgtctcatatttcattaactttcaaatccatcctcctgccttatccttgagttataaataataagtgtcatttgtacttttggaactattttaagttcttcatatattattctgcatgtcaagaagaattagttacagaatattctttgattatagggccttttgtagtttttgtggtatgttgtatggaaacatacatatagctatattgaacattgtacaaaacaaatattagaagataatttatatatttgaaagtcttaaactacagtggtttgttttttcattataaaatgtggaaatgggctgggcacagtggctcacacctgtaatcccaagcactttgggaggctgaggcaggcggatcatttgaggtcaggagtttgagaccagcctggctaacatgatgaaaccctgtctctactaaaaatacaaaaattagccaggtgcggtggtggacacctgtaatcccagctactcaggaggctgaggcaggagaatcgcttgagccggggaggtggaagttgcagtgagccaagattgcgccgctgccctccagcccgggcaacagagtaagactccttctcaaaaaaaaaaaaaaaaaaagtggaaatgagatcatagtgtccccatgagctttttctttttccatataatacaagtataagaatgcccatgagatttattcaagaatttatattatgctacttgtttgagaattaatatcaacatatcagaaaaattaggactaccttctttgtttttgctttatttatatttggactttgaaacttcagacagaatgactttccagcacttttgctcttggtaatctaaataaatatgtgaattacttatctagattatcaagatcctaaaatgacaacacaaaatttatgtttttttgtggggggttattacacatctaatgttttgattttggttttagcctccacagcatagcaaatacaaaacatacatgtgtcgagatatgaagcagagaggaggatgccctcgtggggccagctgtacatttgcacactcacaggaggaactggaaaagtaagtgtgaaagtcaggagactttggaataaggtgtaagtggaataattcgctgacatacagaaatacagaaagagtagctgctttatcttaaatgaataggacatttttagaatgtaacacagcttgaacattcctattctgaaaatctgaaatgcttcaaaatccaaaaatgcttgaaagccaacttgacaccacaagttgaaaattccacacttgaccttgtgatggatagcagtcaaaacttcatgcacaaaattatttaaaataatgtataaaattactttcagactatgtgtaaaagatgtatatgaaatataaatgaatttcatgttatatatttgggtcttatccccaagacatctccttatgtatatgcaaatattccaaaatccaagacaaatccaaatcttgaaacacttctggtctcaagcatttcgggtaagagatattcaacctgtacataatttttaaaaatgaaaagcagtttcttcagcttttattgcatcatgcctatagataggaaactattttatgattagctaaatctaaaagtgggtcattttcactacaaaaaaaattaaaattataataattttaatcaattttaacttaatttaactaattgcatgatgtatttccagtggaaaattttgcccttggctcagtttaacagattcttttaaacttcaaggacaagataatttcagggatgttaaatttttcagctcattgaagaaagaaaggaaaaacctcttaattttttttatttttattttattttattttattttttaaaaatagagacagggtctccctatgttgcccaggctggtctcaaactcctgggcttaagggagcctcctgccttggcctcccaaagtgctaggattacaggcaggagccaccacacccaccgcctcttaatttatttataaatccaatgtaacactttcattaaatttgacaaagataacacaattaaaactgcaaatctactgcaagtattaatattaaaaatctcaaaaatttaaatataattcagtaatacattacaatagatgccatgtctaagggcataacaccctgaatccacctgagctcatctgatctcggaagctaagcatggtcaggcccagttagtacttggatgggagactacctgggaatattgggtgctgtaggtttttttttttaatataaataatataatttttttttaaagaaaagaaaatagatgccatgactctgcaaaagtagtacaatataattatcacaacttagaaaataacatgataatatccaaaaaatgccaaaggcctttgaataaaattgaatgtcaattaaaaatcaaattccagccaggcgccggtggctcccagcactttgggaggctgaagcgggcggatcacaaggtcaagagattgagaccatcctggccaacattgtgaaaccccgtctctactaaaaacacaaaaattagctgggtgtggtggcatgcgcctgtagaccaagctactcgggaggctgaggcaggagaatcgcttgaacccgggaggtggaggttgcagtgagccgagattgcaccgtagcactccagcctgaacgacagtgcgagactctgtctccaaaaaaaaaaaaaaaaaaatcaaaattccttaatacaacagaaatgccatactttctcagcatggtaataaattatattataaatcagaagccaacataatagtatgatgcttaattagtaaaatattcgattcactctcattaaagtcaaggataaagcaaaattttctgctagtaattagtagtaaaattttctaccactgttatttaacattgtggaagtagtagctaatgtatgtaagaaagaataacatagccataaaattattgggaaaaactttagtactagaaacaaaagaaatgagaatttagtaagatggcaaattttaaaaatcacaaacatgaattgccctcgtgtaaactaaaaagagaaacataaccagtttaaaaataagttaaaattaaggatctcttccagggtgtatataaattgaaccaataaattacctaggaacataagagaaatattgagtaaatatactgtgttcttggataaggtttgatgctataaaagtttcattttcccataaacaacaaattccaagaaatccgaatttaaatctcaccatgatgatgttaagatcctatcaaaaattcatttgtaaagaataaataggtacaaatagcaaggaaaattctgaaaattctggaagttttagacaggaactagactaataactatttacctgtattatggactacagtgaataaaagactttagtcttttgcgtaggaatagatagattaatgaaatgcaatagagaatctaggaggagtttgagatgcatataggagcttagcatatgtgctaaaggtggcatttcacatcagtgaccaaatgaatgatggaaaataactgtcacctatttgaaaaatagagctggattcttaccacaatctttatactaaaatgaactctagatgtataagagatttaaatatttaggaaggcaagaaaccacagagtagttaagaggatttttgtttgtttgtttttagttgttaaataaggaaagaaggaaaagatttttttaagaactgcaacccagcatccataaaggaaaagattgataaatttgattacataaaaattataaaactaagatatggtacaaatacagttttttataaaaagcttggtgaggaaatgacacacagagggctgatatcctaacataaaatgagctcttacaagtctgtaggaaggagaggaaccaatagatttatggatcataaacatagtttacggaagaaatactaatggccaattatcctgtgaaactatgttcaatctcactagttgttaaagaaatgcaaattaaagcaacttagtatttttggactaccaaattaacaagaccagtgctacccagtatttgatgaggttttgaaagacgtttttcttcatgatcagtaggacttaaaatagttttagagagcagtatgacataaaaatttctaatttgcgtgctctttgacctcattctgcctttgcttatttggttattcacacagggtgcaagtacatgttcataattatctgttactttttttttgagacagggtcttactctgtctcccaggctggagtgcagtgatgcaatcatggcccactgcagcctcgacttccaggctccaatgatcctctcacctcagcctcccgagaagctgggaccacaggtgcatgccaccatgcccagctaatttttgtatttttggtagagacagttttcccatgtttcccaggctgttcttgaatacctgagctcaagtgaatccacccacctcagcctcccaaagtgctgggattacaggcgtgagccattgtgcccagcacattattttaatagccaaaaaaaacccaaccagcctaaaatgaactgacataaagggatgtctaagattattaagtggagggaaaaattagcagtaatatatgactcaactgctgcaaataataatcttatatgaatataaagctaatgtataaaggaacaattccatataatgatacactagactttcaacaataattacccctgaggggtagttttctccccaacctcagaaatttgtcagttttgggaaacgtggaaaaatagcattattactctgatggggttttatttatttttttatttactttttttttttgttttttgagacagggtctcgctctgtcgcccaggctggagtgcagtggcacaatctcggctcactgcaacctccgcctcccgggctcaagcaattctcctgtctcagcctcctgagtagctgggactacaggtgcctgccaccacacccagctaatttttgtatttttagtagagatggggtttcaccatattggtcaggctggtcttgactcctgacctcaggtgatctgcccgcctcggcctcccaaagtgctgggattacaggtatgagccaccgcgccaagccgaggttttatttttcaaaataaaaatgcattagcagttgtaaatggacttgctttcattgttgaggaacaaagatcctggagtctgatggcttatattttttcctttggttagatttcagaatcgatgtgcttgttgtaccacagcatctctttaaacccaggcaattattctgtattggttccattaacctacttttaaaataactttaattttgtattggcatacataacatcagcatctctgaagcagttctaataaaagtcactatccttaattgcttaaatttttttttgaaacagggtctcactgtgttgcccaggctggagtacagtggtgcaatcttggctcactgcaacctctgcctcaggctcaagtgatcctcccgcctcaacctcccgagtagctgggaccacaggcatgcaccaccacacccggttaagtttttatatttttggtaaagacaaggtttcaccatgttgctcaggctagtctcaaactcctgagctcaagtgattcgcccgcttcagcctcccagagtgctgggattactggtgtgagccacagtgcctggctgcttaaattttttaacagagtaaatgacaaatgtttcacagtgcatactggctttgtttttcttttattcctaattttttaacattggctcattgtatcccaaggcatttgagggagagctgaagtaaaatatttcagaaactatcttctaaagatttttctactagcttctccaataagttttagaaatacaaatgtccacagaaatatattatagcaaaaatattaatagcataatttataatatgacaaatgttactcttttttttgagacagaatctcgctctgtcgccaggctggagttcagtggtgtgatctcggctcactgcaaccgctgtctcccaggctcaagtgattctcctgccttagtctccctagtagttgggaccacaggcacacgccaccacacccagctaatttttgtatttttattagagacggagcttcaccatgttggccagactggtctcgatcttaacctcgtgatccgcctgcctcggcctcccaaagtgctgggattacaggcatgagccacagcacccggcctatgttacacatttttatgaggaattttatacttaatatgtcttgctgctagagattttatgcaaaatatacacactgatagagttaatgtttcaagagagaatatttctagaaaataatattaagtacattttagttcttggttttgcttttatatttgctttttgatatgtgcctatgctttttatatagatttcgtaaaatgaataagcgcctggttccgagaagacccttgagtgcctctttgggtcaacttaatgaggtgggcctgccttcagcagctatccttccagatgaaggtgcagtggatctccctagcagaaaacctcctgctctgccaaatggaattgtatcaacagggaatacagtaacacagcttattccgcgagggacagaccccagctatgattctagtctgaaaccaggaaaaatagatcatctgagcagtagtgctcctggatcccctcctgacctgtacgtcatttttctaactcttatttcaaaatttcttcttcataaagtcgaaggaagatagaataattaatgtttgggatttaaaaaaaaaaaaccctgattattttttttggcctttattttgttgcttttttatttcccatgctagtgttttttaagaaacaattagcatagccaggcatggtggcacatgcctataatcccagcactttgggaggctgaggtggacgggtcacttgaggccagaagttcgagaccagcctggccaacatgatgaaacccatttctactaaaaatacaaaaattagccaggcatggtggcacatgcctgtaatcccagctacttgggaggctgaagcatgagaatcgcttgaacccaggaggcggaggttgcagtaagccgagattgcaccactgcactccagcctgggtgacagagcgacagagcaacagagcgagactctgtctcaaaaaaaaaagaaaagaaacaattaacataggggaaataagatttaaaaattgcaaattttgtagaagggaggactattagaataagtgagtttcccaaattgtagcaatcttttttacttgtaacaatttatgcacatgagaagtattttttaaacaacttccataatattattcccttaggctagaatctgttcctaagagtatttctgccttacctgtgaatccacattctatacctccaagggggccagcagatctgcctccaatgcctgttaccaaaccacttcagatggtacctcgaggttctcagttatatccagcacaacagacggatgtttattatcaggatcctcgaggagcagctccgccatttgaaccagcaccttatcagcagggtaacgattttaaatttatattgctaacttttcttaggaattatcagaactgttcttcaggtcagagtgatcatttacacagtagcctctttaagataagtaaatgtataaatgcattttttaatactttggaaaaattgagattttatgattaactaaatactatgaaataaatgaaacaaagtaataaaaatcaaaccgccatatctactaaaagcagttgcataatacatgtgttcatatataatatttatggaaataacaagttacacaagtaggcaatggaaatttgctgagtaaggcagcatatattctcctgaccaaaattttcttcaagcatgaaaaaagaattaatattatagtgtgtgtaaattaaacacccacagtacatttttcttcttttaattattatttttctgggccctgtaatatatatgaaaaaatgcagcatacacacctttagagagtttacagaatagaataaataatggtaaagaatagaaaactatatgcatgagtagtagatgcatgtgtgtggtgtttatgtatgtgttaaaaattaagtgatctgttgtggttaatattagcttgatagagattgactgaaagactcaagggagatcattgagaacttgaggaatcaaaaagacttaatggaagaaatgccctagaggtatttggaatagaaaaaaaaaagttatgaatggattggaaaaatgagagttgagttaggaggctgttaatcctggtgtgagtactgacgaattagtgtggtgggaaaggagaagaagggatttcaaaaatagacaaatttgaaaattagccagctttaatgataataccaggtatggagaatgaaggaaagaaaataaactaacgttttacatatatagtttatatgtaaaataaacactgaatgattttaagtgttggatctctctgtcagaagcagtatagtactataatttttaaaatgggaatagattaaaagtgctgtcttctttttccgagtctgtcatttaattttgaatcatgttgtcttctctacattcattcatgagaatgttttttaattgatatggcattactaattcatgcaaaatatgataaaacgtgatttgtatcttcctttgaccatccattataggaaaaaatgcaactctttttgtagcctgttttcaattttaggtaaattattttagctatattaagcagaaagagatttagtgcaggagttaggtgcctgccatattggtggaggtactaaagaagcaaacagtgctccagagttagctgccaagagaacttgttacaatgaagaagcagtagaagtagaaacttctgtcctaactgcttaattccaagatcacgtcatttgaggcaaaagttggaaaactgagaaactattgccacaactgttgtctcaagaactgtagagccaagcagtagctactaatctgcgccagcaaaattggccttttgtgttccatgtctcctcccagttatttcagtttcaaattcaaaactcatgcaagtgattgatttgtggaacctgacttcaaggatatctgggaaatgtagtttttttgttttccagtgtcttcattgcattaagacacaccagaaagagggtcaaacaatgagagccaatctactattatagattataagtagggtagttttttcaatgacttttacagataatttttgcttattttttaaaaagctaacctgattatataagcagatggaaaactcgtaaagaaataagtagattatcaatactttagtgtttcagtattttaaaaggtaaaatcttacatagaaaactaaattggctcattatttgcttttgggtcctcttttgtattgtgcaggtatgtattatactccaccaccacaatgtgtgtcccgctttgtccgacctccaccatctgctcctgaacctgctcctccctacttggatcattatccaccctacctccaagaacgtgttgtaaactctcagtatggcacacagccacagcagtacccacctatatacccatctcactatgatggccgtcgagtgtaccctgctccgtcttacacaagagaagagatattccgagaaagccctatacccattgagattccacctgcagcagtaccatcgtatgtaccagaatccagagaaagataccaacagatcgagagttactatccagtggctcctcatccaactcagatcagaccttcgtacctcagagtatgctgtatttttttttattacatagacttaatttgactgttgcttgctgtgattccttactttttatgcaatgacaataaccctttgatgaattcttttttataagagagcttcttttttttttaaatcttttcataatttgggtattttttttttttaaactatataatgagaaaaaaatctgcctcctccccacaattaacctttcttagtttctgaactttagatggtttaattaacaattctagatctacttggtaattatgaccaaataaaagaaacctaaatttagctatttggaagatcttgagagtttggggggttttgttttactttgttctgttaagtgttggtgtttccaaatgttaagaagggtatacaagctgtttcataacttaaaatatacgctgagtatattaaatgaattaatctgtcctgaaattctctttcaattttaactaatctttctatttttaggaacctccttatagccggcttcctcctcctccccagcctcatcctagtctagatgaactacatcgccgacgaaaggaaataatggcccagctagaggaaagaaaggttatctctccacctccttttgcaccttcaccaaccttgcctcctacctttcatccggaagaagtaagcaaatcatttttagtctcatttatccgtgtttttttgtgtgtgtccggtttaagtcatctttgcctattcccaatggtgtgaagattttttttcctgttttcctctgaaaggttttttatcatttaactctacaatccatctagaactgatttttgtatgtatgtaatgtaatgcattaggagtcaagatctttttttttgttcctgtaaggcactgactcggcacaatttaatgaaatcagcatgctttccctggtgtcctgctttatcataatcaggtgaccacacatgtgtttcctgaccctattcttttccgtcagtctatttctatccttgaaccgatgccacattctcttcgtatagttttataataagtctcaatatgtggtggttatattttctagtattgttatttttcaagaatcagcacgttgatttccacaaaaatatctgcttcaattttgattaggattacatcagatctgtaaatctgtgctgtccagtatggtagccactagccacatgtggctgttgaacatgtaatatgtggccagtttaagttcagatgtactatagtcatcaaatacacactgaattcaaggatttcataccaaaaatgtaaaattcattaatatttttgatacattggattaaataaaattattaaaattaatttcacctgtttttgttgttaatgtggccaccaaaatgttttaattttatatgtggatcacatatttctattagacagtgttgctttatttttatttatttatttttttgagacagagtctcactctgtcacccaggctggagtgcaatggcgcatttttggttcactgcagcctctgcttcccaggttcaagcaattctcatgcctcagcctcccaagtagctgggactgcaggtgcacaccaccattcctagctaatttttgtatctttttttttttttttttttttttgagtcggagtctcattctgttgcccaggccagagtacagtggtgcaatctcaactcactgcaacctccacctcctgggttcaaatgattctcctgccccagcctcctgagtaactgagattacaggcacgcaccaccacgcccgactataatttttgtatttttagtagagacacggtttcaccatgttggccaggctggtctcaaactgctaacctcaggtgatcctcccacctcagcttcccaaagtgttgggattacaggcatgagacaccacgccgggcctagacagtgttgtcttagatcaatatgatgagaagtgacagctttcttttttctgagacagagtgttgctctttcgccaggctggagtgcagtggtgcgatctcagctcactgcaaccaccgcctcctgggttcaagtgattctcctatctcagcctcccaagtagctgggactacaggcatgagccaccatgcccggctaattttttgtattttagtagagacggggtttcaccatgttggccaagatggtcttgatctcttgacctcaggtgatctgcccgtcttggcctcccaaagtgctgggattacaggcatgagccaccgcgcctggctgagaagtgacatctttctaatatcaagtctctatgaacatgatataccccttcatttatttggattttctttatacttcatacttcagtgtcttgcgcgtcttacattgaattttattcctcgataaccaatgttttttgaaactattttaaatagaattgtttggaaatttttattttctattattaatatagagaaattaaatagatttttatgtattgacccttctattcagcaggcttgctaaatttctttattaatcataataatgttagtagattcttttgaattttctgtgcacacaattatgtcctctgaataatctttttcccctttttaatccttttgttttgtctttgtcttattattttggactccagcataatactgaatagaagtgatgataacacatattcttgactcctttctaatctttgagtaaatggagcttttaataataatttaccattatcatgtttgctgtaggcttcttggtagaaaatctttatcatatttatgaaggttttctctaatcctagtttcagatttattttaaataagaaagaatatcaaagatttatttaactcagtaatgaggaaaccagccagaaaagttggtttaatgaataggaaaaaacaggtaaatatagatagtgaaaatcagaaaaaaaaaacagtcaaataagattgctcaaaaaaaaaactggttaatgtatcacagggcaataaccataatttggggagtcaacttctttgtatttctgtatgacaatgctagtagttatagtgaataagtgttgtcttattatcttaatgtctagatggtctacagtgatgttcgtttttctatttctatattggtaatttttttttgtcagtcctgctagggatttatcaattttatttgtctttcaaaaagccaacttttttttttttgttttgtgagacagagtcttgctctgtcgcccaggctggagtgcagtggtgcgatctcggctcactgcaacctctgccttctgggttcaagcgattctcctgcctcagcctcccccagtaactggtattataggcatgtgccaccacacccagctaatttttttgtatttttagtaaagatggggtttcaccatgttggccaggctggtctcaaactcctgacctcaaatgatctgcccgtcttggccttccaaagtgctgggattacaggcgtgagctactgtgccctgcccaaaaaatccaactttaaagtaatcgtatttgttttgttgattgtacatactgctttagcttatagtttgtatttttttttttaataatcaagtaaggtttctcaggattacagttgatactatgtaaggaacttgtcttgcatcctttatgtatagaattatgattctaaacattgctaactgacaaatcatgaataataaatgaaaattgagaagtacatcacacatagtaaatagtatcttgttgggtatatgaaggaagtctactaaatagaagttgttcacaatatctagttttctcatctaaacactttggatgagttttccacaaaaatgtaggttattagtaaagtcacaacatcttctattaatgtagttttatttgtaaagtaaaaacagccaggtgtgcattagctcacacctgtaatcccacactttgggaggctgaggtgggaagattgcttgagcccaggagttcaagaccagtctgagcaacatagtgagaccccatccctacagatttaaaaataaaaatgagctaggtgtggtgggacacgcctacagtcccagctacttgggaggctgaggtgggaagatcgagaggatcgcttgaacctgggaggtccgtgctatagtgagctatgattgtgctactgcactccagcctgggtaacaaagaccctgtctcagaaaaattagagggggggaagaaaacaggtgtgatattttttcaaaaattctttattagagtacaccctggaactttgttatgccatattgttttataagaaatatggaaaacaatatgacattgtaaaaactgagcagtttttggtatcaaacattctaaactttgaggttcagttgtgtccttcactgtgtgatctttttaaaattacttagcctccctgaatcctgaggtgcacgtttcttcatttataaatcaaacataataaagcctacctcatagtggtgtggtgaagatgaaacataaggcatctggtatgtagcaggcattcagtaaataattcatatttattattgttatttttactcctaataaaaattataataatgtctgagtattaaggaacattatctagaatcattttagttactgagatgcaaagacatatatttaaacctcagttctgattataaacaacctgaatacaaaaattagccgggcatgatggtgggcgcctgtaatcccagctactcgggagactgaggcaggagaattgcttgaacccagcaggcggaggttgcagtgagccgagatcgcaccactgcactccagcctggatgacagaacaagactcgttctcaacaaaaatttaaaaataaataaataaaacaacctgtgtatagttgtactaaattcatacattatagaaatacatgatatagaaagagaagtttctcgaaaatctcattttctataaccatttattatgtatttaaacttcttatatatatttcaccttctttctgtgcatgaactaacatctttttagtagacacattataattgtacaagtttatgggatacagagtgatatttctttctttctttttttttttttttttttaattttttgaggtggagtttcactcttgttgcccgggctggagtgcaatggcgcgatctcggctcaccgcaaactccgcctcctgggttcaagtgattcttctgcctcagccacccgaggagctgggattataggcatgcaccaccacgcccagctaattttgtatttttagtagagatggggtttctccatgttgatcaggctggtctcaaactcccgacctcaggtgatccgcctgccttggcctcccaaagtgatatttcaatacatatatacaatatgcaatgatgaaagcagggtaattagcatatcatctcaaacatttatcttttatttattttgggaacattcaaaatcctctcttccttggacaattgtgtatgtgatactcactgctggaaggtcaaggttacagaaatgcaggatgcttccagagagtttcaggtcaccctttgactggtaggtaggtagcatttaagtcattcagaacagtcatccaaattttcttttcttttttttttctttttttttttttttgagacagactcttgctctgttgcccaggctagagtgcagtggcacgatctcggctcactgcaacctccacctcccaggttcaagtgattctcctgcttcagcctcctgagtagctgggattacaggcatgcaccaccatgccaggctaatttttgtatttttagtagaggcagggtttcaccatgttggccaggctggtcttgatctcctaacctcagatgatctagccacctcggcctcccaaagtgttgcgattataggcatgagccactgcgcctggccagtcatccaacttttctttgaagaagagagcagtgttacatttaattgtaaatttttgtattatgtaacattgtaggaataacattcttcctgtgggctaaataaatatctccttatgattttcagattttatttcaaggaaaaatgctgggtagatctactgttgtccttgctttttgtatctacaacattgttgacatagtgtttatctcaagattcctttataaattggccgggcgcggtggctcacacctgtaatcccagcactttgggaggctacagtgggcagatcatgaggtcaggagatcaagaccatcctggctaacagtgaaaccctgtctctacgaaaaatacgaaaacaaaactagccgggcgtggtggtgggcatctgcggtcccagctcctcgggaggctgaggtgagagaatgacgtgaacctgggaggcagagcttgcagtgagccgagatcgcgccactgcactccaacctaggtgacagagcaagactccttctcaaaaaaaaaaaaaaaagccaacatctcttactgcaaacgtgatgttgttgttgttgttgttgttgttgttgtatgaagattgtggtttctctttttttttttttttttttgtgacagagtttcacactgtcgtctgggctggagtgcaatggcgtgatctcggctcactgcaacctccgcctcccaggttcaagcgattctcccgcctcagcctcccgagtagctgggattacaggcgcccgccaccacgcttggctaattttttgtatttttagtaggaacagggtttcaccgtgttagccaggatggtctcgatctcctgacctcgtgatctgcccgcctcagcctcccaaagtgctgggattataggtgtgagccaccacacccagcctaagattgtggtttctttcttcctcaaatcgaaaatcattttgttgatattcctttcttttgtcaatctatcctagatactttccattttattttgactttcaagatcctaagtagaaaattttaaatgtttctgttttcttaaaaaagagacagggtcttgctgtgttgcccaggctggtggtctcaaactcgtgggctcaagcaatccacccaccatgccccgtccaaattttttatgtcatttgtaaataagtaaataaacctggatggaattggtctatagaaataatggataaaattgtatataaagatcagtttatgatgttaaaagttttcttcaaaaaaacataattttttcaaatcaggaaaaacaatcctctcttctagtttttagaaaatatatagtaaattattaactgtactcaccctgcagtgctatagaatgctagaagtaattcctcctgtgtagctataattttgtatctgttaaccaagctctctccccttccctccccccattccctttctagtctctcataaccacagttccactctctacttctgtgactcaactttttagctcccacattgagtgagaacatgaaatatttgtctttctgtgcctgaccaatttcacttaatgtgatgtcctctaggctcatctatgttgctgcaaatgacaggatttatttttttatgtctgaatagtatttcattgtatatataccacattttctttatcaattcatctgttgctggatacctaggttgattccatatcttggctattgggaataaaacatgagagtgcagatatcccttcatatactgatttcttttcctttgaatgaatgcccagtagtgggattgttggatctctgtattattattattattattatttgagatggagtctcactctgttgcccaggctggagtgcagtggcatgaacttggctccctgcaacctccgcctcccaggttcaagcaattttcctgcctcaacctctcgagtagctgggactacagtcatgcaccaacacgcccagctaatttttgtatttttagtagagatagggtttcaccaccttggccaggctggtcttgaactcccgacctcaggtggtctgcccgcctcgacctcccaaagtgctgggattgcaggcgtgagccaccttgcccagcctcattattattttttaataggatcatttagtaaatacatcttggttttatgtctgtcttgcctttgtttttgtttttacctaatccattctcctggccgtctttgtatgtcagtatataaatttatctcattcatttaaatagctacatataatacactacagagatttaaaaaaggagcactcttggccaggcatggtagctcacgccagtaatcccagcactttgggaggctgaggtgggtggatcacctgaggtcaggtgttccagaccagcctggccaacatggtgaaaccccttctctactaaaaatacaaaattagctgggtgtagaggtatgcacctgtaatcccagatacctgggaggctgagtcaggagaatggcttgaacctgggaggcagaggttgcgtgagcagagatcatgccactgcacttcagcctgggtgacagagcgagacaccatctcaaaaaaaaggagcactgtaattggtaggtcatgtggtttaaaagttggctgttctatctaaagttagtaagtagaagaaaaataaaaaaggataaaaattttttaaatagtagtaggacaaagaaaagggaagaggttatgaataatagagacagaagagtgattgacaatgagtgatattagtgagcagcagaccctatgtcaatgcagaaggccaataatgatgactcagaaaagagatgtttttagtatagcgggaggcatagatccacttaaatgaaccaatacaaatgaacactgatacccctagatatcagtgtatgtatgtcttgtgataaaatgaaagaaacattaaagttatagtcctagcactgccctatactggtatagccttggtcatatcatctgtgttgtctatcatggatttaggagcttattaggtagtatacatgaaaacactttgaaaatgtaaaacattttataaatgtgaatgttgcaattttagtgaaaatacattagccttagaatagctattctgttattagactggagaacttaccttgagaagataaaaattagacatccttttcatctcattgaatcaacctaaggaacagaatttattcaagatatgaattattgctattaaagagatttcagtaaaaagttactacatcatcatgtactataaaaatcaaaatttttaatgttcttgtttaccttgattttattgaaagaaacgttgaggagggtctagcaaaactatggcttggtacatatatgcttaaatgtttactgatctaatgaagaaaaggatgagcaaacccataaaatcctagtttgattcctggaaggatattgaaataccttttttttttttttttttttaccttctgctaaggtaaaaaaaaaaaacaaaaaaaaaaaacctgaaagctaaaaatcactcttcacttattttatatttttcatagtagtttacaaaaatcttctattgtggcacttaaaaatcaaataatcatcattatgttgcttcagcacgatgttctaagaaattccctgctttctctgtcttgttactcatagacccatttcctgttttgtttctttctcttttttttttttttgttttttttctttctccatctgtagtttttggatgaagacttgaaggtagctgggaaatacaaaggaaatgattatagccaatactctccctggtcatgtgacaccatcggctcctacattggaaccaaagatgcaaaacccaaagatgttgtggcagcagggagtgtggaaatgatggtatgtgtaatagctaagcaataattaatacaaattaagataaaccaaataaatttttacccattaccatttaggcacaaataattcagctttgcttaagagtttcagaccatattctatactctgcagttgagttatctttaaacagtataggtttttgattcatttaggtgtaaataaaaatattttaatacttaccgagacagagcatttattatatttctgtgcaaatagcaatttctcaacaattgtttataacccagattaaattattttacataattaattaagatcttggacttcttcaccaaataagttaaaattctttgtcacggagaatggcatgaacccgggaggccagagcgtgcagtgagccaagatcgtgccactgcactccagcctgggtgacaaagcgagactccgtctcaaaaaaaaaaaatttttttttcacagctctgaagtttaaataacaaagttgaatctagtgaacaaaagtagtatttgagtcagaattatagctgctcagcttcaagtgaatgctgagatactgaaatttaatacttgggttattttattctttagtgaaaaatcatgtaacaccagtgtttctaataaccaagttgaaaatattatcaaaatcttatctctttttttgggggggggatggagtttcactcttgttgcccaggctggagttcaatggcgcgatctcggctcaccacaacctccacttcccaggttcaagtgatactcctgcctcagcctcccgagtagctgggattagaggcatgcgccaccacggccagctaattttatattttttagtagagatggggtttctccatgttggtcaggctggtcttgaactcccgacctcaagtgatccacccgcctcggccttccaaagtgctgggattacaggcgtgagccaccgtgcctggcttcatcttatctctttttatagagataggatcgatctttgtcacccagggtgtagtgcagtaacatgattatggttcactgtaacctcaaactcctgaactcaggtgatcctcctgagtacctaagactacaggtgcttgctaccacacccagctaatttttttaaaaaaatgttgtagagatggggtcttgctatgtttccagactgatcttaaactcctggcctcaagtgatcctcccgcctctccctcccaaaatgctgggattacaggcatgagctaccctacctggatagtatcttaattccctttttattttttaaagaaataaaattttcaagaagtagttatatccccctgtataaatcccccaagtctcatttttctccctgtttcattccctctaagtaatctctatcctgagtttagtatttatcattttcatggataattttatttcccctaagacaggatctccctcatgctggagtacagtgtcacaatcacagctcactgcagcctcacactcctggactcaagtgatcctcccacctcaccctcccaagtagctgggacacagatgtgtgatactatgctcagctctttttttttttttttttttttggtagagatgaggtcttgctatgttgcctgggtaggacaggctggtcctgaactcctgggctcaagcgattctcctgcttctgaaagtgctgtagttacagatgtgtgccagtatgcctggccatggataattttatactattcctaaacaatattgttttatatgtttatagaccttatgtaaattgtacacttcagcttgcattttcatgttttcacttagcattgcttttaagatgtgtactttttttttgagacggagttccactctgtacccaggctggagtgcagtggcatgatctcagctcactacaacctctgcattctgggttcaagtgattctcctgcctcagcctcccgaggagctgggactacaggcacataccaccatgcccggctaatttttttgtatttttagtagagatggagtttcaccatattggtcaggctcgtctcgaactcctgacttcaggtgctctgccctcctcggcctcccaaagtgctgggattacaggtgtgagccaccacgcccagtctgtatttatatctgtagctcaggattattgattttagctgcttttacgagatattctgtgtaactgataccatacaatgattattttttgtattggtggacatttaggctatttctgatctttcactgttaggtatggtactccaacaaacattcttcaaacattcttatgtatgtcttcacgtgtgtgaaagttacacttagaaatggtattgctggctgggtactgtggctcatacctataatcccagcactttcagaggccaaggcaggcggatcacttgaggtcaggagtttgagaccagcctgggcaacatggcgaaacctcatctctactaaatacacaaaaattagctgggcatggtagcaggagcctgtaatcccaggtacttgggaggttgaggcaggagaattgcttgaacctgggaggcagaggttgcagtgaaccgagattgcgccactgcactccagcctagacaacagagtgagactccatctcagaaaaaaaaaaaaagaaatggtattgctgaaaggtatgccttcactattattcttaacccatttgtccttattaactctaacagaggtttcctaggttattatatagattttcatagataaatacttttccaggtggttaagaaaagaccaatatttgcaataaaaaaagatttggatgctgataaccactgtaaatgagtgaagtgatatctaatagcataaatacaattatatgccagccccacccccccccccaaaaaaatagagagttttagaggaagaaaaagcaaaataaaatttttttttttgcagtagaattacagaagcattgtttttaggctgtagtaaggctcttattggaacgaaatgaggggaaattaggcaggaatctttgccttgtacttggctttcaaaaggaaagggttattatattaaagtaacacgagtattagcaaaataaaactcattttcttaaatcagtaaagaattaaaaagtttgggccaggcatggtgactcaaacctgtaaccccagcactttgggaggccaaggtgggaggattgtttgagcccaggagttcaagaccagcctgggcaacatagcaagaccccatctcttcaaaaatttttttaattagccaggtgtggtggtgcacgccggtcccagctacttgagaagctgaggcaggaggatcgcttgagcccaggaggttgaggctcacacatcactgcagtccaacctggtgacagcagaaccctgtctcaaaaacaaacaaacaaaaagttgcaatccaatctagaggtaattgaaaacctcccaaataggtgaaagaagtctaacctagtatttctcaaatgttaatgtgcatacaaactatatatttgtgtgtctatatatatgtgtaacattatatagggataaatatatatttgtatgcatatatatatactaggtcattatatatatatatatatttcttcaagattgaattggcttttattagtgattgattaatcaggaagcatttcatctgtgaaatagaaagatgctctaatgagctaaacagagaaaaggaacaaaactcagattagttgtttcaaagttattttccttataggactaaagcagaagggacttaccagttcaaattgagtggtcctcttatgattgattgctgtgaatctcctgttttttggaaaactggcccattttcaagttcagtttgattttgtggcatctagcataagtgattacattctgctttgatctggtgtcttggggcttagtgcgggagcttagtccaaaacagtggcctcccataaattttaaaaatatatttcttaggccaggtgcagtggcttatacctgtaatcccagcactttgggaggctgagcttgaggcaagctaagcccaggagtttgagaccagcctggtcaacatagggagacctcatctctataaataatcaaaaaaaattagctgggtgtgctggtacatgcctgtagtcccagctacctaggaggctgaggtgggaggatcactggagcccaggaggttgaggatgcagtgagccatgagagtgcccctacgttccagcctgggccacggtgtgagaccctgtcgcccctcacctcagaggtttaaaaaccagtgttacataaaaacaaccaaaggtaactaatgattttagtcttaccagtaagagtgctgtactcttctttaaccttattacagatctagaaaaaattaggttacagagcgatctgagtgtggggtaatttctcattttgcttttttatcagaatgtggagagtaaaggaatgagggaccagcgattagatcttcagagaagagcagcagaaaccagtgatgatgacctcatcccatttggagaccgaccaacagtgtctcggtttggtgccatctcacgaacttccaaaactatatatcagggtgctggtccaatgcaggctatggcacctcagggagctcctacaaaatctattaacatttcaggtaagaatctcagaggtaagctgacctaaagggttcataatcttgactttcagcattacccctgctctccatttactatcagtgtttttagtaatcttgcaaggcagtaattttcaaactttccatggaatcatccctgtaagaaaggtaatataacccagagaattttaggtatataaactgaaattaaatgtctatatgtgaagctttcctaatgtttcttccccactccacccccaccccaaatagcttaattgttatttgggggaataacattctcattatacagtaatttggaagaaaaactacaaagactgaaagttcattggggaagaaacaaacatatatcagcacccagcatcatgctgcctgatatttagaaaaacaaagttaaagaattttaaaaatctggacatttagggtagataccagatacctgtgtatgcaatacgctgatgtctttcagattatgaataccttaaaagaagaatcaaatctgtgaattataccataataaatcattctcttacagattatagtccatatggaacccacggtggctggggagcttctccatattcacctcatcaaaacataccttctcagggacacttcagtgagaggtatgagtcattctttttacttgaacaaacatgtagaaacctttaaaattaggcaacttctttttgtttttctggtcagtaatatgttaacaaaatgaaatgttaaaatttgattcacactttctttctaaccaaagggagagaatatctatgtcagaagtggccagtcatggaaaaccccttccatctgctgagagagaacagctacgactagaattgcagcaattgaaccatcagattagccagcagacccagctacgtggactagaggtaccagcctagagagccattttattccaatttttgaagggttctcagagattttaaataggaacttttgaggcactgtgaacaaaaaactttaaggtctatttcttaggagttagtataggtttctattcttcaaagaattcaatactggatttagctctgggacaacagaaaacgtaaaatttctgctacctaaaaatagaaaacagattacgtaaaatttcccaacaggagcttatattccctgatggcacatttaaggttttttttgtttgtttgtttgtttgtttgttttggttttctttttttgagacagtattgctctgttgcccaggctggagtgaggtggcgtgatctcaactcactgcaacctccacctcctgggttcatgcaattctcctgcctcagcctcctgagtggttggggttatagatgtacaccaccatactcagcgaattttttgtatttttagtagagatagggtttcacccctgtaatcccagcactttgggaggccgaggcaagtggatcacaagatcaggagtttgagaacagtctggccaacatagtgaaaccccgtgtctactaaaaatacaaaaaattagccgggcatggtggtgtgcacctgtaatcccagctaatcaggaggctgaggcaggagaatcgtgtgaacccaggaagcagaggttgcagtgagccaagattgcgccattgcactccagcccaggctacagtgtgagactccgtctcaaaaaaaaaaacagaactttgacttaaaaagtaaaacatagttccggtgtaataagaataataacacttttcatttacgtagttctgtaccatttaaaaatcactaccacttatcttatttgacccttagaatatccctgatattttaggcaggtggtattgtcctccttttttgattgaagtatatgagtttctcagaagttgaaacacgaacccaagtcttcatactccagattcagtgttctttccatcatgctgcctgacacttagaaaaacaaaactaaagaatttttaaaatctggctggacgtggtggttcatgcttgtaatcccagcactttgggaggccagagcagatggattgcttgagctcaggagtttgagaccagcctgggcaacatggcaaaatcccttcactacaaaaagtgcaaaaattggccaggcatggtagtgcacgcctgtagtctcagctactcaggaggctgaaggcaggaggatcacctgagcccagggaggttgaggctgcagtgagccctgatggtgccactgcactccagcctgagtgacagagtgagactctgtctcaaaaaaaaaaaaaaaaggaatttttaaaatcttttaagtgccacataaggaagactaggttttgtttatacatcatcctttacgttggaacatattctttgaatatggaaaactgaagacattctaatgataaatatattgtcctttctggaggaaaaaatggtactgttagaacattagtctgtctttctaccataatctttaataataagtaagccatcactttaggggggaaaaaaagttataagacagactttcttagtagactttctttttaggaagaccagtaggagattgtttttggaacatatagctggcttgtgcccctatgtacgcaattagatttaggaattttaaaaatctatgtaatacttagattttgtctgctttcgccattgcttatttacattgattcagaacgtcttgccgattcctgtcatagaaacagaatgccatgtttgcttatggcaatctttcgttcattaactttttaaagattcagaccttcaacccaataaggcattactccatatcttcaaatgcatggttttttgtttgtttgtttgtttgttttatatactttaagttctagggtacatgtgcacaacgtgcaggtttgttacatgtggtatacatgtgccatgttggtgtgctgcacccattaactcgtcatttacattaggtatatctcctaatgctatccctccgctttccccccaccacatgcatgattttttgttttaaagtttccaggagcattttctgtccaaaaagactatcagtattatttagaaacttgccacatatttaactcagtacagttaaaagtccttgccattactgaggtttcattgaaataagttataggatttacttcagagaaaattaccattaaaaacagagggggaaagatgcacatctgtagttgacttgtttttcttccatttccttttttttttttttttttgagagacaaagtctcactctgttgcccaggctggagtgcatggagtgcagtggcatgatcatagcagctcgctgtaatcttaaactcctgggctcaagtgatcctccctagtagctaggactacgggcccacaccaccatcccaggctaattttttggtttttttattttttattttttgtagaggcgaggtcttgatatattgcccaggtggatctcaaattcctggcctcaagtgatcctcccacctcagcttcccaaagtgctagaattaaaggcacaagccaccatgcgtagccaacttctctttcaaatcagaaaatacaaggagcaatttatacataagatgaaattactgtttactaaatttaaatgtccctattttgttatttttttgtttgaatggtactcaaagagaacagcaccttacagttgcattattttgttgcaaatggctgggtgataagctactcaaggctgtggtctggaattgagcctggttattctgtgcatggtgtgaagtgtgttgagttttctgtgtgcttggctttatgcactaggctgttagtaacaggctggtgttgcagagggaggcaaacaccctggcaggccagtcacagcccccaccaccgccacctccaaaatggcctgggatgatctcaagtgagcagttgagcttggaactgcaccaggtggaaagggaaatcgggaagagaacacgggaactgagtatggtgagtgttatggtggggaaagagagggaaggtgaaatgaaatctttcatgtggctctagaattatctagaggcacagaatcatcacttcaaggcactctgatgagtggttaatatttaaaataattctcatgcaggtgggctaccttccgattttatcattcccttcctcattctcttggtttgggtgtgttctttgtcttataattcttcgttaacttttagggaaaacaaggttttaatgcttctgtaatttaagaacttaatggaagtcttaaatttctgtttagcatactgattagggaagcaaataggatggtgtttactattttgcaatgacaacatgttatataaagatgtattcaccaaataacattctagtttcatagcctttataatgatgacctatttttgctatgagtgatatgcaatctgcacattgtttcctgtatccattatgtatgcttaggaaaaactatatccattaatatgcttaggatttgcttcatagtgcacagacattcattttagtaaattttgaatcttaggggcttcctcaggttgcatgatatgattttttttgttgcttagttttcataatctttctttttttttttgaggcggagtctctgtcgcccaggctggagtgcagtggtgcgatctcggctcattgcaagctctgcctcccgggttcacgccattctcctacctcagcctcccaagtagctgggactaggcgcctgccacctcgcctggctaattttttgtatttttagtagagacggggtttcaccgtgttagccaggatggtctcgatctcctgacctcgtgatccgcccgcctcagcctcccaaagtgctgggattacaggtgtgagccaccacgcccagccagttttcataatctttctaagcaaataaattgagcatgcaggttttttttgctttcagtaagtatgttaaagatatttattgtactttggttttcttttcttttttttttttttttttttttgagactgagtctctgtcacccagggtggagggcagtggcccaacctcagctcactgcaacctccgcctcccatgttccagtgattctcctgcctcagtctcccgagtagctgggattacaggtgcctgccaccacaccagggtagtttttgttttgtattttattttttttttagttttttttttttgaggcggagtctcgcactattgcccaggctggtgtgcagtggcacgatctcagctcgctgcaacctctgcctcctgggttcaagtgattcttctgcctcagcctcccaagtagccaggattacaggcacctgccaccacacccagccaattttttttatatttttagtagagacggggtttcgccttgttggccaggctgatctcaaactcctgacctcgggtgatacgcccacctcagcctcccaaagtgctgggattactggtgtgagccaccatgcctagccttttttttttttttttcctttttttgagagggagtctcactctgtcacccaggtggggagtgcagtggtgcaatctcagctcactgcaacctccgtcttctgggttcaagtgattctccccctcagcctcttgagtagctgggattacaggcgtgtgccaccacgcccagctgatttttgtatttttagtagagacggggtttcgccatgttggccaggctggtctcaaactgacctcagcagtccacctgcctcagccccctaaactgctggtattacaggcgtgagccgccatgcctggccgcctttctaggtcattgtttttttctgagaaattttttttcatgttagcttgaggcattgtctgtcttattgtccagcttggttagtgagcaagtggattgtattctgttatgtttttatgtatgtcactcttttagtctgccagtttctttggttattttacaaaattgaatatgatttctggatcatcactttgtattatctgtaatttggtctctcccattaacaccattaaatagatgataactgattttatttccttctctttcaaaggaaaaccagtgttctctggacatgaaaagcaaactgaatacaagtaaacaagcagaaaatggacaaccagaaccacaaaacaaggttccggctgaggaccttacattgacattcaggtaaagaaaaggagattgtcgtagccatattaaattacacacaaaagagaaactaatatattatccagtcatatcagaaataccctcataaatataatttgattcttaaaatatcattattctgtgtacataaagaatatttttgcggccgggcgcagtggctcacgcctgtaatccagcattttgggaagccgaggtgggcagatcacgaggtcaagagatggagaccatcctggccagcatggtgaaaccccgtctctactaaaaatacaaagattagtttggtgtggtggcatgtgcctgtagtcccagctactcgggaggctgaggcaggaggatcacttgaacctgggaggaggaggttgcagtgagccaagatcgtgccactgtactccagcctggcagcagagtgagacacggtctcaaaaaaaaaaaaagaatatttttgcataaatctggagttacaaaacttagatccaaggttgaattatctgttaatacctaacaaaggaaaatttctggttatgtttccatcttccccttgtttttaaatttatttcgaatacagccttatatctttacattataaaaatactatatgctcaatgtaaaaaaaaagaaaaaacaaaaaataaagtcactcccccatcttaaatatattataaaaaattagctttaggaaatggaaaattttagaaaagggcaaattttaaaattgcctgtaattccaatattcagagataactcttgttaacattttggtgtattatattatctttccagttttttttttgagacggagcttcactcttgttgcccaggctggagtgcaatggcacgatctcggctcacggcaacctccgcctcctgggttcaagcgattctcctgccttagcctctcgagtagctgggattataggcatgcaccaccatgcctggctaattttgtatttttagtagagacagggtttctccatgttggtcaggctggtctgaaactcccgacctcaggtgatccacctgcctcggcctcccaaagtgctgggattacaggtatgagccaccgcacccggctctttccagtctttttaaagtgtgtgggcatttagcctcttgctagttttacaaacccagcactccatctccctggtttttaattcagtctatcctatatcatccagtattattctgtagatacggaaagatacatatcaactaccatgaacaaccctacaataaacagtattacaattaatgctttgtttgcatatcttaaattattttctaaggctattttgaggcttttgaatgcatagtcctaagttgcccccctgatgatatataacaaaaatttctaatgctttcagacttggattttgactgtttttttaattcatgcactatcttggattcttttttattttttttttgagatggagtctcactccgtcacccaggctggagtgcaatggcatgatctcggctcactgcaacttccgcctcctggatttaagtgattctcctgcctcagcctcccgagtagctgggactacaggcgcgtgccaccacacccggctagtttttgcatttttaatagagacggggtttcagtgtcttagccaggctggtttcaaactcctgacctcatgatccacccgcctcggcctcccaaagtgctgggattacaggcatgagccaccatgcctggctttttttttttttttttttttttttttgataaaatctcattctgtcacccaggctggagtgtagtggtgcgatcttggctcagtgaaacctctgcctctcaggttcaagtgattcttgtgcctctgcctccctagtaggtttttacaggcacacaccaccaggctaatttttgtatttttagtagagacagggtttcaccatgttggccaggctgatctccaactcctgagctcaagtgatccacctgccttggcctccgaaagtgctgggattataggcatgagctcaaaattatttcttgtagtagcaaacctgctaaatcagggataagtactcttcttaaaggccaggtagtaagtattttaagatacgggccttacagtttttgtcgcaattctcaactctgctctgtggtttgaaagcagtggataatacgttaaacaaatgaccaggctatattccaataaaactttagttacaaaaatatgcacctgaaaaaaaaaatacgcacctggctagctttagtttgccaactgtgtgctaaaacatggataaggggctgtagattaaaatgtggaagccatttatatattttcaatcatgctaaattatatcccctgttgattttattgtagtaatcatttttctctctctcctttttcaaaattttaaaatgtcagcagtgatgtaccaaatggatcagccttgacacaagagaatatcagcctcctatcaaacaagaccagctctctgaacctgtcagaggaccctgagggaggaggggataataatgactcccagagatcaggagttactcccagttctgctccttaaaatatgaggagtcctacttttatcttctgctcctaatcagtttgtcgggcataggggtaggagaacgcataacttctaaactttttctcttaagagcggtcagagaaatccaggaaattcaccagaggcaatgtgcacaaacaccactactaaaaacaaaccctgcacatagttcacattaatgcatttttttaatttaaagaaaaagaaaattagcagtatctgcaagcaattcagattaaatttgtttttgttctgtgaatgaactttattttaataactttggacgccttggatccagggctttaaaaaaaaaagatattatatatacactctgtttgattaattgtatgatcttaatgaagtaggttttcttgtattttggtattacatacccagtgtataatttgtataattcctcacccccaatccttatcaattctcaccaccccataaacttaaaacagaccaaaaatgtcagctttcagagaattctgtggtgcttgagaaacagacagtactagactgagttattagaaaatgtgcagcaaaccaacttttcccagagctgttatttggaattctttatccctttctagatcactagcttcattggatacgtatatttttcttgacattgaagctttttgtttgtttgggagggttttatttcttgtttttattttcaacttttcaaatagaattaccaattttgaagtcctcattttcatattaaggatcatttgcattctcttaatataatcagaaagctgattcagtgtttaattagatttaaatgttgatcaagaattaactgtaacttactagcactgaaaatacatgtttggtgtttcgcctgcgttcagctcatggttggaaatttgaagcagtgcttttcaaattaaacttttgctgacatcataggatgctaaaaaacaaggacaatcaactatgttttaaaactgcaacatttgatttgaacttaaaatgaatagagccacattattttaatggatgttttgttttacttgtgaactgattgagtcttaaggatagtttatgaattgatcacttgttgctcagaatcattagtataagtaggtaggaaatagtttgaagtcatttttcatagacttaactgtccaatgttgcaaatgtttcttcatgaaaatattgaaaagagtaaggttttttttttttttaattctgctgcacatattctgatgccatgtgtctgtgcttaattaactaagaccctataaaacgtgtttagtggggactgtttgatatagttgccctctccattcctctatttgcctgatttttttcagtttccctttctgtattttactactaaattagaaagcactggttatgtaataagttactacattgctttggttgagtaaaaacaagagtttatatttttcttgtttcttattttcttaacccttaactcctgctgaggtcataacaacctcagtctaagctctgtgtccatcatactgttaacttaaacaaatgggtggtgggggtgggaagggtaatacagtcctgccattgcctaccagtaggagagtccaaacagaacactcttttgagtagcaattatttaatttgcccagtcaaggcaccgtgtttatatactatttcacattgaatttgattatgccctacagacctggctggtcaaggatttgatatacacatattggcttgggattcgagctttcttttttatttaaataaaaatttatatatatattatatatatacatatatacatagctatatctgtatatatattgggtatgttttaaggattttttcgcatgagcgcagctgttgcgataaattgaccgattgggaggtggtagaagcactgaatgaaggtgaggctttttttttttccagttttcttatacatttgtcttctttttttaaaaaaaaaaaaaaaaatatatatatatatatatatatatatatatatgtatgctttttcttttttttttggcttttgtttgctttttgacttttacttaaaacccttttacatttccactttaaatgcctattgtttattgggagaaggaaagaaacttttgtatgtctgacagagtcccaagatttttcatttctctgcataacagtaaaaggcaacattattggcctccaaccttctttttttttttttttttttttttttggagagggagtctgcttctgttgcccaggctggagtgcagtgggttgatctcggctcgctacaacctccacctcccgggttcaagcgattctcctgcctcagcctcctgagtagctgggactacaggcacgcgccaccacgtccagctaatttttgtactacaaccttcttataagcagatttggactgatcttctcctttgggtatgtcagatcatcctaaattttagaagcagttgattcactttggaattcagaatgattcttgtattagaagataatttgtgggtattaatttttgtttaagtttaaaataaaagtaaagattcattttggatatcagttgaaaccccttagtaactcagtttctgttattcttgttctcatttcctttaaatacacttgttcttggcttttgccattttgattctgtgaagtaggcaggagcagggattaatttatacagtattcctgttctgaacaaaaccagaaaagtcactgtataaacttgacttaaaatagtatctttctcttttcatgtattttcatttgggggaaaaaaaatctctttaattgtaacctgaattcaagctgtacccctccatggtcctacactctagagctaatctggttgggcagaaaggcagaaggatggtatattgtcccattgtgcctataatgtattttaaattggtcattccaccttacctaatggaaattcttgcagctttcctagtgctcatcagcggttttaggaattcactaacacccccaaaatttgttttttgttttttgctttttttccttttccttttctctgtgatatcatgagcctgtaaggacaaatggcatatttgggcataactgcttgactctgtaactacttttttaaaatcaaaattgaaaaggtattaattgcttctggctttttaatttttttttttagagacaaagatgaaaccagataggaaatacagtttttatgttttctacttactaaaatattagtttcttctaaatattactttatttgtatttcactaaattccaaagcaaaaatcagatatctgagatgaacaattttgaatgggttaaggtaggagtaataagcattgtgttcactcatacataggtgagggaattttatttatagcgagaaatataaaagtattttgacttactcttttttcaaggagtcgctaggaaagggtagaagaactgagaataagacatctagattccatttctggtttatatgtagctcttttgcctaatttatatataattttgtcataagataagtccagtaactgtcctgtcttagataacgtacagaggctgaagtgaccaaagatccattccttattacttttctaattaaaagaagagttagctagatttctagtagtagtattctagatattgataagacattattcctaatgccaactacaaatattcaactactcagaatgtatttaaaaaattgtttggtacagcattaatgttggtgattcctttctcccatcttatttcccttcccttctattctttcccatgtatttcttttgcctaaaagaatattggtatgattctcatttgctactttgagtatataactccatcagactttccagagttcttcagggatggagctcaaagtttacatttttccatatatgtctttttttttcttgacctttttccaccctgtaatttccccttgacttacccactgccctccccaatctgcaacagtgacagtttgctgcctcaaaacagagcattcaaatgaattcgcttagccaataacttctgtgaagttgccttttctaatggtgttattactcagtgatgcacaaatgtggtatttgccctactggtaggcaaacaaaggtctggttaagaatggtaacctgctgttttctttaaaggagagccaaagacttgtgctttactctgttttggttttgggggaagtagtagccattttgatcatgaaaccttttagtatttgtgagttgattgtactgtgtaagtagatttatctaaagttaactgttaaagttagctagccttataaaatgtaaaagtaatgaaaattcatcagtttctctaagccagtgaatgtcgtcttttgtaatattgtgtataagcatttgtgcccaccccagcttctgctatcactgtggtcaagtcatgggtctgagtaaaagaattcttgagtatgtgactggtgagaaataactaactatagtcagtacatgtacagattgttaaaattcaagacaaaatactttcactaaaaaaaaggattcgtctcagtaaagaagtattcagttgctgtcacttacatacaaatggtggtgggtagcagtctcaccatttttctactctctttttgctcgttttaaataattgagtaaaggttttatttgtaaaatctatctgtaaaaagcacctgtaacgatttatatgtcattgaaaggaatggcccagttactttttaggagagattaataacctacctggaaattaactgcagtgtttacttagattttttccccctaataagagtctaagtgtgttaaatttttaactgatgatatggttacagtgttgcaaggtgatctcttcccctgaaaaatctgcctatccttttaagaaaaattagacctactaaactaaagcaaattttactttcatcattagcacctaaacaagcaagcagtctactactgtcatcattttacctgagtgcccattttgctgatccacattcatacctttctaccttggacagctatgatttttatatttatttgttgcttcagctcaggtttatgaaattttcctgctgaaatgacttattgggagttgtaggttgattatagttactattaaacattttctcaatttagcttttctgagccacttcaagaagaaagctgtttttgtcaaaaggtactattaattgtagcaagtaaatcttaagatttgaatttttaagattttatttctgtgttcactaaagatctttccacaagtaatagattataattgataagtaatactagctatagtgttaataaagagtaagactatcaccaccaggaataagtaacaccttttaataataaatctattcctaataggtatgttttcaatactgcactgaacaaagtgggtaaagagccctttgaaatcttattgtaataaagggacttacctcaccactggaatccttgttttcagagcctctggattttcagccaaacactgaatttctcctaaactttatccctgaaacatccctagagaacgaactttattttcacaagaaaataaggcacaataagggggaagaacttaaacctcaacataatatcgtgtccaaaaatgtgtatttagaaaaataaaatcctgtggagtttgttatcctaatgtttattttatactagataaggtgacttgttttcttgtattgaggtcttactgtttcagatttgtttttgtttctgttctaactctaagcagacagagctcacaagtctttggcatccattttaggttgtacactcagagtcatcttataactggaaactgtcaggtggtcccccaccccagtgagtgtatgaaagagtcaagaaaaagattggaaacaaactattgggtgaataattggttgctctattattattattattattatttgcctttttttaatcaccatttatttgtgtaatctttctccattgattggctgtcattcttataatatctgaactaccccataaaataattctctgacttaaaggcatttagcttttgcttatcgtttttacatcctctattcaactaagacactgtcttgagagttattttttccagatggatcgttggcctaaattttcacacttctcccctgttcatcctttttcctcttccctgcttcctgggaataaaaggaacttttttaaaaaaattaattagtccacaggtctcattatctttctttatgattaatctatgactttttggtacaagaacaatggaaaaagtgaattaaggtaatgaacaaaacctttcacccacttaaacattttccagttttgagattcctcttcgtgtttgtggtgtcttccccttgttaccccttctgccctttttctctgactatggtaatttggtctttaggctcatatcagtctccccgagacattctgcagtcattatcacctttttgggtggattttattttgttttattttgttttttttaaaaaaataactttttaacattggtgcatatttgcttgggatagagcttgtgtaatttaccaatcgtattgattgtaagtgattgtgccctgcagaggtatatttaacaagacaaaaataatcttggttaataaaggagcccatgagatttgagtcaggttgtaagtgaaatcacttacacttttggatagaatttatactcctgctcttataaatcagtggtagacttaccattttttaaagttttcttgcatttttttgtttttttattgccacagctccctattctttcttgcctgcctccacccccctgttcaggaaaaaaaaaaattgagccttaaagtgacagctgattttttaattgctgaattttgtgaaattttactttttccaagtgtttccaactttaaaaagagaagtgaagacaaataggttggaatggtgaagacaaatggattggaatttcacaggctgtgaataattccttaggatctggcaaaccgtgaagtcttatttgaagaccttatctcctgagagttcttttggagtaggaaaaagaaccctatttgaaatagaccgtttttctcttgtttttaatctgtttaatatttctgatttttaagcagctttcaaaacaagtgtggtggaaaaaaagaaatagtagtaggaagatgtttagggcagcagaactctgggtctaaataagtacatgttcccacttgttgccgatttttgagagtactagggccatctttctcaattttgtattatttgtgtgcatgtttatatcaaagatgcccattttgttaaaatgctatttcctttattaccttggaaactgactcagcctcatgttgctcctaattagtgtttaaggctcccatgagttgcagataaaatgatttattttaacaagtagaaggaggtgattcaccttttggattgtaaatatatgaaaatgtctacaaggtctttatctgctttctgtcagcatttatattaaatgataaattaatgaggaacgtgtgtattttgtaaatgagtgtgtgccatcttattctaatcttgagattactttcttacacgtttttaatggagggggcttttttaggtgaaaaataaagaaatggctaatctgcatgagcaaacaca

SEQ ID NO: 10 - DNA, 68566 bp, Mus musculus
ggagtctgaggaagaggaaggggacgaggacaacgagcgacgggcggcggaggacgcggaggaggaaggggaggccgaccaacaagatggcccctgctgcaggagcagcctcagcagcagcaggtggggggctggaggcggcgctggcggtggcggctacggccgtggtccggcggcctgggacagagtcagagtcgatggtggcagcggcggcggcggcggctgccgcgacggtggcgacggccgcagggactcggagctgagaggagctgctgctcggaccagagcggtgagcaagtggcggtcggcagtgtggggagcggggcggccgcggccgagaacaataggcagcgactgcggggatggggctgtcctcacccgccctgcgctcgggaccggccccagggcttgtcagtggccggcgtcctttaggcctcaggcctccgcgtgcctcccggagggcctgccggggtaggtaggccgaggggcggtgcggacgccgccctggacgccgggaaggctggggaggctggggcgggagcggggggttgggggggtccgaggctgactggttccgaggtccctcggaggacagcgggcgggcggtgagtttgctcgcaggaaatgttgtttggacccctgtctgtgcggtgggggagggagtaggcgcctgtaaacagccgccgctcctgcctagctgccaggcgtggctgctccctccccagcccccttcctcccttggccaagtgggttttagggtgtcggtttcccaggagttcctggagataaaccctattggccaagacgaaaccatgtgcaggtgcctttttcaaaaagactataagtgtacaacaacaaaaacacacaaaatgtggttgttggtaaaggatggagtagtaaggggtggacctttcctaacaaggttctaaacatcaggtctctgtaaacaccacggtactcacatcccaggtccgagggagctagccgaaacaagggctctttttgaagcagcaataatgtaactcttgacatcccagaatagtccgtgaaactggaaacaaagccacttattggcagcacggagacagattgttaaggtttgagcggaacttttctaactagccattttgaattgtgtacagcagaggcgatatcattaacctctttggtatctgctggaagcacttaggacagagaagtggttcatctgtctcccttaggagttcatgtgtctgtctcatattctaatcattttttttccagtttgtcccaaaatttggagaagattcttttttctctgtttgaaatttcatatttaaagcctactttctaagatttccaatacttttagcctgccgttatgcttgcctgtgaatcctagcactcaggaggctgaggcagagtatcctgatttgacaagacttgtatcaaaaaactaattcagccaacaaaatgccagacaatagaaacttttactgatagttttcaaaaaacaaaaaccagttgtggttctgttttaagtggctaggcttaggatgagacacctcattttatgttagtatgctatactgcaataatatctttatacttaaaagttagctatttctcctaaatgtaatttttctaggcatttaccacatacattttcaaatggagggggaagaggtaaattttattccattttctacgtgggtatgcagaaaaattattaaaaagcttgaaagcattcaagaagactgcttaatattcactttcaggatctatctaggggtctttgtgtttcttcctttccttttattgttttggagacgtggtcttgatgtagcccaggttgggcaggaattaacagtcttcctgtcttagcatcctgaatgttgggctgagttaatattaaaaggaaggttgacttgtacaaagaagatattgcttgatagcttttgccaatttctagggtaatttcctaatgaaaatctatctctgactgttaaaagtattgttcagtaatatgaaatttaattagcagtactagtttctaattctattgaggagttgatagtgaataattatataaaacataaagtgagtatagtagtatcatagattaatatctgcaaacttattttatgcctagtataatattgtatccctagtataatattgtcatggatgctttgatcttttgaatcatggagagacaatttttatattatatatctcctgctaatttgactttggggaggggagatggccaagaatttcagaacactttgttttttgtttttgaagaactcagattggtaagttttcttttcctagtgaattttattagatacaaagaatcatgtgtattgtaatgatactgaaattcattgtgtggcctaaacatattagaaaaagtacaaactaatttatgagtttgtaaattttaagttataaaaaaaaccttcattacttcatcaatgacttgttaatctaatttttcaaaaaacaaaagccttcaactaagaaacgagggagaaatggctcatgtcagtgggtaagagtgcttgctaagtagatataaagacttaagctcgaattcccagcactcctgtaaaaaaaaaaaaaaaaggcaaaacaaaacagggggtgtgtctgtgccagggctacatagagaaaccctgtctcgaaaaaccaaaaaaaataaagtaaaaattacagggttaaggagtatatatatggctatggtaaagtgcttgcctagcattcgtgagggcctgggttctatccctagcacataaaccattatcatcatcaacaaaaaaaccaaagctgtggctagtgactcttagtactgtagaagtaaaagcaggaggatcactgcaagtttgatgctaatttgggatacagagtaaattccagatgagtctagactagaatgaggccctgcctcaaggaaacaaacaaacaaaatatgtatgtatgcatgtgtgtctgtgtatagtgtctgagagcatattcttaaaactgtttatctactccttctcctcctgttgcattagtggttgcattgttatccttacttcacatatacagaatatagagttagaaacagctaagtcaatagcaaaaagatcacatacttagtagataagagtgtactcatacctacatcttctgatacaaagtagctgctttacagctactacgtgtatcattattaaacctagaagcatcattctgtattgacagttttcttttcctgctgtgaatgttttatagcattgtacttgacccctatttctgttacttgtacaatgccaaatacttatatggtcaagaaggtataaatctgaatccttaaaaaaatgctttttttgtttgtttgctttttaaagcaggttcaaatgcaatgacatatgaacattcatactttttatcttcagttttttattttatgtatatgagtttatgtgtgtacaccattctgatcctgcagaagtcagaaaagtctgtcagatcctccagatggttgtgagccaccataagggtcctgggaaccagacttaggttctctgcaagagcaacaggtgcttcaacccctagaaattgatacttttagcaagacagatttttggcattgctacagtttgctatctaattactaaattgtacctttgaattacttcatgaaaaattaaaactaactttttaataatatttaatgttgttaaagctaggtcatatgatacttgagcttcttcatgataagtctccccacccccctttatgctatagataatttagaactctgccatgtcttcaagaacttaggggcttaatatggaatttgatgggatctaattagtctatttttcatatatctttaaaggggtcagtctctcacaaagtgaagaataaactgttaagtgatccctgtctggtgtctgtctcaggtcaggatgttccttggcagggttttctgacctggtttagctttggctctggctatatttatgctcaggggttagatattcttcaggattgagttcagaaagacttctcagattggcctaagccagaagattcggattttaaaatcagtatgcttcctaggatgtggtttaatacctcctggtgaaggctggaatctcttattctgtttggaggttagagtataagaatagcgctacctgtctcgtgtcaccagcacgtgtatgtaccacatgccactgtgtcctcaggttcttgggatttgaactcaggttctcatgtttgtatggcactgagtcatttcctcaagcccttagtctctgtctgcctgcctgcctatcttttttaaagataaagtatctgtgtatctctgtctctctccctctcctctgtgtgtgtgtgtgtgtgtgtgtgtgtgtgtgtgtgtgaaatgcagaggtgttcacagagtccagaagagggtgtcagatcctctggaattggagttgcccagtatggatgagtattggtgactgaactcagattatctagaagaacaaggagctgagccatctctgcagccccttccattgtttcttaattcatacagaaatcttgagatgtgaacagaggagccagacctggtggtagagtcataatcctagcactggagagcatgagtcagaaggaggacaagttcgaggtcagtctaagggatatagatagtgctaggccagtttggaccaaaggacttattgagcttctttgaaaaatgtcttattcataattatgtgaaatttgactactttttgtgtagttctaaagtagaaaaaagttgtaaattaaatgtgagagtagaagaactataattaagatatttaacaaggagagtagtaaaataaattatccacaaccaccacacattatcgtagagcagcagctaactgcctagtacctatagactcttaagaatatcattaaacgccacatatcagtcctgatgataaattcactgtgtaaattttaaagtatatttgtaattttgaaaaatcataaaattgtaggaatgtatagtagagcagagagtagtagttggctttcttttgttttgtttgaggtagtctcctgtagtcaaggctgacttcaagtctgctttgtagtctactcctcctaccttcatctgatccacctcccaagtcctgggattgcaggtgtgctctaccacacctggtgttctactagttctggagtcccaggctttcggcacgtggggcaagtgtgctagccacagccccaacttaagtagacagaaactgttagaacataaaccttcaagtaaaaactatccaagtgctcttttttttttccacttattttgaaattttttatgtgtatgtatgcctgagtgtatgaatgaagactgcatgggtccacgtgcctgtggagtccccaggaagccattggatcccttggagctgaagttaatgaaaactggggtatgggtttgggaaactaaacctgggtttctgcaaacccttaacccctgaatcactctagctccagtgctcatcctgtaacttacattttatcattcctgtccttaagcagaaatgataatatgatttttaaaggttatttagaagtttagatgacataagtatatctttagaacatacctgacaccaaatcccactccataaatgtcatattctcttcttcactctgacaacagaataattttagatatacttatctagactatttgagaaagttctttaaacattaatattcaaactacattttaaaaatcattgtacaaggggctggagagatggctcagtgagtggttaagaatactgggaggcagagacaggcagatctgggtgaggccagcctggtgaaatagcatcaggccctgtctcaaaaatcaaacaaataaaatgcatactactcttgcaaaggacatgagttctctagcacccatactgagtgacctacaactacctgtaatttaaactccaggggatctgacactctcttctgatctcttcaggccctgcactcatatgtatatactcacacagatacacatatatacacatagtctttaaaaattaagttaaaaaaaatctttgtatagtttaggattaactactgggtgagcaatggtcagaaatttgtcagaaggggtgggtggatatgggggacttttggtatagcattggaaatgtaaatgagttaaatacctaataaaaaatggaaaaaaaaaaaaaaaagaaatttgtcagaaatggagtaatttctaatattgccattgtctttttttcccccattttcagttttttatttttgttgttggttagttggatttttgtttttgtttttgtcttgagacagagagtctctttgtagccttggtggttctggcattcaatctgtagactgggctggcctcgaacttacagggatccacctgcctctgcctctgcctcttgagtgctcggattaaaggtgttgaaccaccactgctggcttttcttttttgttgttgtttttcatgtgtaagaactacttgcttagtgtccttggaggctattgagagaatgtcagatcctttggagctagagttagagaaagttgtgacatctctccagctcccagtctttgagttttattttgaaatttattgtttgatatcagctgttatatgaaatttggggggtgctggtgcaaggtatgtgatgtctgtgatgcgtgtaccgtacagaatgtgtggccagaagaggatgttgggtgttctttggatgttcttgcaaaagaatctctcagtgaacccaactggctgctttgtgctggtgagctggccaacaagcaggctcctaagagcctccagtttgtactgggaattctgggcttataggcaggtgcaggcaatgctcagtttttcttttttgttttttttaatgttggaactggggatttaaactcaagtcctcagtgtcacagcaaaatgttcattcatacccactaaaccatctttccagcaccttgaacttaagctctttaagtagattttaattattattattatttttttgagacagggtctcactgtgtagctctggctgtcctagaactcattatgtagaccagactagcctcaaactcagagagatccacctgcttctgcctccctactgctgaatgttgtgaggtgcgccactacaatagattttatttgtaaaaaatattttatatttttatgtaagttctggttaaataaaatttaaaatttagtttctcaattgcatcagcatatttcagagtattggtagccatagctagcacatgtttttagtcccagcactccagagcatatgtcacagcagacatgtgagttcaagaccagtctagtctacatggaaagttcaggccaactaggaccacatagtgagactctgtctccaaaactgaaaggctaaggatttggaaatgctattttattttgtagctctcctgttgataaaagtctgctcacaggggctagagagatggctcagtggttaaaaatgagtactgctttttcagaggaccccagtttggatcccaggacccaggttggtgctcagacctgcctgtaactacaattccagaggctctgatataccttctagcctccttgagcacctacacacatgtgtgatacatacagacaatttttaaaaataaaaatgtatcttctaaaaaaacaacttgctcataagagcataaaaaaacaccttttaaatcactttctaccagtagaaataaaatttgatacgttttggtgtatgaaagtcaataatgcagtgtttaattaaatcttcttaaatacatataagaacaactttcaatgtcatagagcctagaataggtaatcctttgtgtgtgtgtgcgtgtatgtatgtatgtgtgtgtgtgtatatatatatatatatatatatatatatatatatgcacacacacaaatatacatttatttattttaaatttcattatagtaacaaattaaaaaaaaatcacaccaaaattaactagacccaaagactataaaactctgaatttctacacagattggccttttagaaaggaaactggaacttcccattggattttattctttaactagtgaatatattttatgtgcttatccactagcaaaacaacaacaaaaaaaatccatgacaaagaactagaaaaacagttagctttgtatcttctttcataattcatgttcattacctacattaatccttcctcattacttaatatttagcctttcttgttctcttttctacatgttgtactgtacccacatatatatttatttacatatataatttaataatatatattatgttaatataatacatacgaaacatattattggctagattctacataaggggaacatgagttatttttctttctgagattatgtggtcttgtttaatattaaatatcctaagtctatccatttttccttcagttttgggggagttttgagacagggtttctctgtatagccctggctgtcttggaactcactttgtagaccagactggcctcaaactcagaagagacccatctatctcttagcccttgaagtgctggaattaaagttgtgcttcactgtctggcttttcctgaaaattttgtgattacatttttctttagagctgagtggtattccattgtatatttataccaaatttttattgtctgtttttgtgttggtaggcaactaggttcattccaattcttttttttttttaagatttatttacttatgagtacacaccagaagagggcatcaggttccattacagatggttgtgggaattgtgattgctgggaattgaactcagcacctggaagagtagtcagtgttcttacctctctctccagtcatctctccagccctcattccaattctttactttagtaaatagagtaatacacatggggatgcagatatttctattatagaatatagagttttctgagtatgtacccaagagtgaaatagcagggtcatatggtagtcctatttttaattatttgagagatttccaagctaatttccacaagctgtattaatatatacttccactaacagtgaataatcagcccttcctcaccacagcctcgccaactgtgccaaaagtctaggtgacagccattctgattgaggtgaggtcatatcgcaaagtagttttaatttccttttccctgatggctagggattttgaacatttttaaaaatagttattggctatttatatttcttttctttttttttttaagtgtctattcagttcatttgcccctttgttggttggcaattttgtttccttggtatttaatttctgcagttctttgtaaatgctgtatatttagtcccttgtctaaagtatagctggtaaagattttctcccataggctggtttgctctgtcagttgttttctttgctgaacagaaactttgtttttgagattgcttccttctcagcaaagctctgctgtttcagagctagctctgtagaccaaggcccagtgatcctcctgcctctgcttcccacatgctggaattaaaggtgtgcgccttgaagcctggcaaattttgagttgaaatttttgtacaaggtaaaagaggagaatctaatttcattcgtgtgaaggcagaaaacccagtgttgccagccccatttgttgaacaggctcttttccagtgaatgatttttcctcttttgtcaaaaattaagtgggcatggctttgttgttttatttcagggtagtctgtcatattccattaatcttcctgtttttacaccctcgccaggttgtctttttgactgactacagccctgtagcattatttgaacttagtgttaagttataatgcctctagcattcttgttccttctttaattattcatggtcttttatggttctatgtgtattcttgtattgttttttgctaaacttgtgaaatacatcagaattttgataggtattatatgaactctaaattaattttggtagtatagcctttccacaatattaattctgccaaaccaggagcatggaatgtctttctgttgtctgctatcttctgtaattttcttttagtgtcttgaagtttgttttgagggttttttcatctctttggttaaatatattcccaaattcttaaatttggcatttgtgtttgcgtgtgtttagtggaacattcgtgcagttcataggacaacttaaactctccttcctgtgggttctaggttgaactcaggttgtcagacttgaagataagtgcttttaatttgatgagccattgtgctggctctggaactcatttggagctcatgttgggtagaggtaggaggatcacaagtttgaggccagcaccatctacaaagcaagtaccaggctaccttgtactacagagcgagaccctgtctcagaaaacaagcttgcagctagagcattatgggcagttaaaagaactggctgttctagaatacctgggttcaattcccaacatcctcttataggctcacaaccctctgtaactctagtttcaggatctctggttctaggcacacacatggtacacatagatacatgcaggcaaaaccttcttacatataaaaataaccaaatccaatcttgatgagtggccatcctgcccaccatcctcctacagccatgtgggacaccacagttgggctgcatcaacgagttacacaatatttgaagggaacggtgttggagattctgtccatgggaagccctcagtggtggacacatttttcacatggcttgaacagatttatcagtcctgactggacagttcttcacagttatctagtgggttgtggcactgagcctgagttttgtctacaaagagtttacctgttacaggattggtactttatgacctatgccttgggaacttaccacctaaaccttttcataacgttcttttctcgaaaagtgtatccttccttgatggaagactcagataacagcctttcattaccaaccaaacaatgaatttattagttcctttatttgaaagcttccagaattaaaattttgacatgcagctacaaaaggcattcttgtggctgtggtctgtactttgttttactatcatcatggttttctgtgtcacagtgaagaggcaaataaagcacgcgactaacacagagagcagaggtacagagagagggatggcctccctacttagaagctggactacattcgcacatattcaagaacagttttgagccattgtaacagtacctttttcacatagagtagttgtgaggaagctgaattttctttttaagggaagcctcaatgatttgtatctgaaataccagatccttgaagaaactggtatttaaaccaagttgcagtgatttcttttttagtgatatacagatgtttgaaacagacagaattgtactgactatagataggcttgggaggtcaagcgggtggcagcccaagagagcaggagggaggatgggatacagccctggggagctgccttcctgaccactatgaggtcactcctctctgcgaaagggacatgccagcctgcttcctgcgtgtgaaaataatttaatgctttgggggtgattttcacatagctctatggggttctcatgccagtttctgaatttcatctcattagagatgttcttcaacttggcatctatcataatgactcaaaattttgttcttaactatgataacttttgaggtcctagaattatattttgtttgaaaattttcctttttttcctaaaggttaaagacgggtcaattaataggttgctaaattcaggacagagaatttcagtaatgtatcagttccttggacatgtctggacatagtaaatattcaagttttggggttttttatggctaagagtatcaatcaaaagatagtatgaacctgaacctctgagagctcccagaaactgagccaccaaccaaagaacacacaggtactggaatgagaccccagcacatacgcagcaaatgttcagctcaatctccatgtgggtctcccaataaggggagcagagcctcttcctaaagctgtagcctgactgtggtatcaatttcctaacagggctgccttgtctggcctcaatgggagagcatgtgtgtaaacgggcagagacttgatgtgccagcgttgggagataaatcagggagaagcaccctctcagaggagaagggaaggagggatgagaaaagggtctcaatgagggaggaggctctggaagggggagtgcttggggcttaattaattaattaattaaaaaaagaagtagttatgggaaaggatattaatataaaacataaagtatctcctgcctaacaaggagaaaatgttttaagtgataggaggagagaaatgatgaccagatcgtgtacactgatagcgtagcgtgttatcaccaaagaatgaatttcttgttcaaaaaaaaggaaaatatataccctgttatctcagcgcttgggaggtggagacagaaggacagaaggacagaaggaccaggaattcaaggtcagccagggctacaaaagagaccctgtctcaaaaagccaaataaataaaagtatgtatgtttatttgccatggagcttttaaatgttaaaatgtcatagcatattacctttactccagtttccttatctgtaaaaataacaataatgcttttagggtcattttgagaattaagttacatagtatatgtaatacatttattctctttcttcttttttgtttttggtgatggtagtggtgtttttttgttttgttttcaagacagggtttctctgtgtagccctggatgtcctgagagaagtttgagcaagaatagctgagttggaccagccagagttcagaaagaactaggaagggatgagcttgttcagcagtaagtctcagaggttaaaaacattcttgtacagagtctataagtttccaggagtaggcctaggttagcagactgaggcagtaagcctcaaagacaacaattacaacagttggtcaataaaagttatttttacagctctgtattcaatatccagtactaaaaaaggagaaatgaaaggggcaagttttgtcttaatgttgccattaggaaatatgaggaaaaagttgtcaaagatgattcttagtgcttctgtcataagtagtctgcatgctgttgacaacagaagcagaaggtagctgggcagtggtggtggcacacacctttagtcccagcactcaggaggcagaggtgggcagatctcggagttcaggccagcctggtctacagagagagttccagggcaacacagagaaaccctgcctcaaaaaacaaaaacaagacaaaaacaacaacaacaacaacaacaacaacaacaacaacaaaaacaacccagcaacaaaaacccaaacaaaaaaaggaaggagatttattggaggtgaggtggttttaggtatagaaaggttgagactctagctggcttgtatattctcactctctctcgttctctctctctcattcaaaagggatatctgcacttgaaatgctattttcaaagttagctggacctagttggcaatagaaagcataaaaatagaccaaaccactgtagaaaacttaggaaagagaattgaagaatttctgaggaaacaccaccaatcagtccaatgaggagaggagaagcacttaacagagtcaagcatggagtggtttggcatttagtaactacttggacaggattttgagtaaaagccagaaatggacagcatttgtagaagaacagaaagagttaaagtaagaattggagttgtagtagttgaatttcatttaaacaagaaaagtccttttctatatttaagagttgttacatgccaggcagtggtggcacacacctttaatcccagcacttgggaggcagaggcaggcggatttctgagttccagcttggtctacagagtgagttccaggacagccatggctacagggaaactctgtctcaaaaaaacaaaaacaaaaaaaaaacaaaaacaaaaagaattgttacatattagtggctgaagtaggtagaatgatagtttgaacatggacaatgaaaaggcaaatggaatggtagaacctaaaagactgccagaaattgcagaaaggctttgtctagtttcacagagtctcattatgcagagctggcttgtctggaagtcaaaggcatctatctgcctgcctctgtcctcccagcgcgaggatgaaaagcctgtggtcaaggacatttttcttttcttttttaaaataagaaacaaaggttggagacattttaaccccagttcctccagcgtaactagaaagttatgctcatgtatacatactgttgagacaagagttagtaaaggggggcaaattgaagaaacactacagaattaagaactatttatcaatctaaaacatcaactgtttaattagattttcttttcattgtgaacattcatacattcatttgttattatttgccaatcagatttgtcattgtgattaaaattttggggactggatgataaaccatcaacctaccattttacagccagacatgatggcattatgtcaaaaatcttaccttaagctaaggaaaggtgtgaatttgaggctagcctaagctacatagttagaccctgttgcgggaaatattaaaaatgaacggcattttctgagctacaccgggcaccattgggccacatggctccagctgggtgttctcatctcagcagactctctggcccagagctcctgagatgtctccacccaacttgctcatttcccttgacaggcattgccaggccagccccatgcaacgaccgtccaccctgcaacctagtagaaacaaaactctagaaacttataactaatcagtcagatttatatatcaataaattcttaattcacaagatacccatacaataatttcagggccaattgataatggtacaagctgcctacctagattagacaagttaccccaattattttatccctatatggaaaagttgtgcaattaagaagtagcatggtagccgggcagtggtggcgcacgcctttaatcccagcacttgggaggcagaggcaggcggacttctgagtttgaggccagcatgatctacagagtgagttccaggatagccagggctacacagagaaacccggtgtctcaaaaaaaaaaaaaaaaaaaaaaaaaccaaacaaacaaacaaaaaaacaaaacaaaaccaaaaacaaaaaagaagtagcatggttctggagagaatagttagctattaaaagtcaactaggcaggcagggagatcaacctggtctacaaagtgagttccaggatagtcagggctacatagaaaaaccttgtcttgaaaatagagttgggcctggagagatggctcagcgattaggagcactgactgctcttccagaggtcctgagttcaattcccagcaaccacatggcagcttacaaccatctgtaatgggatccaatgccctcttctggtgtgtctgaagacagttacagtatactcatataaataaaataaatctttaaaaaacaaagaaaataaagagtttatgttgctttgcaaaggactcaagtttagtttcttgcatctgtgtctggtatttcatggccacctggagttccagcaccctcttctggcctcagtatgcactagcagctcacgtgtacataccccaacagatcacaagacataatttaaaaatagatttctttaaaaattaaaaaggtggcaacagctatcacaaagaaaacaattttaagaattcatgttttagggctggagagatggctcagtggttaagagcactaatgcttttccagagatcctgagttcaattcccagcaaccacacgatagctcacaaccatctgtaatgggatctgatgccctcttctggtgtgtctaaagagagcaatgtgtgtacttgtatacataaaataaataaataaatcttttaaaaaaagaattcacgttttattaaaaaagtgaaaagattatgtgtatcaaaatattactcgttttagtaattagttctcaactggcttaacattaaatgtagagaacatagcttttaagtgtttgcatatctagtataggtaaattttaatagagtattaacatagagggcttaaaaataaaataactttgcaattttgatataagtgtaaattcttttttttctcccttttttttttattaagatttatttatttattacatgtaagtaacactgtagctgtcttcagaaactccagaagagggagtcagatcttgttacagacggttgtgagccaccatgtggttgctgggatttgaactccggacctttggaagagcagtcgggtgctcttactcactgagccatctcaccagccccgtaaattccttttaagatgatggtttttagcctggctgtttcattctatcacttctgtggtgactgctgttatctttttcattgtggcacattttacataatatattacaaattgaatctataaaaatataaattagatgctgctgctagacactttcttgggtacctttcttcagtctctgcttgggcaccttccttaggtttttaccctcatcactgcgtttctttcttgtgtgacactgtgttggacctaaaatgactcctcctctgaacacagtaaaagtaagccacttagtcagctggaggcagagacaggcagatctctgagttcgaggctagcctagtttacttagggcagtgattttcaaccttcctaatgttgaaactctttaatatagttcctcatgttgtggtgtccccaaacataaaattattttcattactacttcataactaattttgctactgttaggaatcatactgtaagtatatgatatgcaggatatctaatatttgacccctgggaaaaagtcatttgacacacaccagcaaaggaatcaccactcccaggttgagaacttctggcctagggagttctgggtagccaaggcacatgtagagaccctttctcaaagataaaaacttcagggctggtaagatgatggctcagccactaagaacactggctgctcttccagaggtcctgagttcaagtcctaggaaccacatggtggctcagggctatctataaaggtattgatgcgctcttctggcacgtaggtatacatgaagacagcattcctacattagaaacaaaaacaaaaacccatttaaattagcccctttagcttcccccctaaaggggatgataaatgaagctccagtttttaccctctaactcagtagcctttctctttgtgtatgtcttagggtgtgtgtgtgtgtgtgtgtgtgtgttgtgtgttgtgtgttgtgtgctgtgtgctataaggttagatagaactcaatccaagtattttatgaagagatatttttacaattaaaattgtttttcctcaaaggggtgtcattactataacttctagtcttcaaatcttagactataatttcctctgtaaattactgatgcctcactgggaattacaacacttaagtgtaataataagcctttgtttttctttgtgctattgcttacttagcgtcagttttcaggatagttataaattttctcttctctaatgtggtccctttatgctggttgccatagaaatattccagagaagtggcaaactaggttaaggtcaagaataatgattcttaagaagttaccatgtgggatagaatgagaagtgatccaagaatatttttctttacatataataaagttttgtttgatttgatagttttctcaaaggcagcctaaacctaacctaaactagaacctttgttttagtccagttcaacagttaattagccattggctgaaaaatgctgcttgccatcaaaggtttattatctataaacaggtatacttctgtcaggagaagaacttgcttatagcagatacagtgaattgtagttcctgttttctctgaattagggacaaataaaataaacctgtaattttatggtaagagatggttgtgatatacttaacatttcacagcagtataatttaatggttcagtacagctattgctgtgctcatagaaaaactgaccagtggacattttaaaattataaataaacatttgagaaacaaagctataaaaagacaggcctttaatgattttagcagatttattgattgaaattttacagaaaatatagttcacttaagtatagaattcacctactttaatttatagagctatgcaactgtcagaattatctggttttagatttcctgtcacttaacaaacatttcctaatatcaaccactattaactacataataggtttaaaagtaacagcttaggagtttggtctccttgagatatagtcctgccatttgctttgattacctctttgtttgaagccttttaaattttaaaattgggtaataactgtattacagcattgatgacatttcatcacaatccctaatccttaggggatacttttcaagacctccaacagataccttagatcataggtagagcagagtacacagtctttcctatgtggttcatgccctgacccctcttttacataactcattttgtaccttagtgccatttattgagaggttactcaacacaaatgagtacataatgagttctaggccagtgagggctacataggtcagacagaccctgtgttttaacatcaagagtttataatctatacatagctataatgatgcctcagaagaagaactaatttagaacaggtatttcatcaattttaagtttgatcttcctctgaattagggatctgacaaccaaggtggctgttaaagttagcatatgcagtataaatcagcagtggctcaaaatatattgaacaagaattccagaaataagtcataaattttaaattatactctattctgagtaacatgataaagtcttgtgccgtctgggagatgagtcatccctttgtccgagaatcaggatgttattttaataattgtttttcatgtgtttactgttgcttagcccaagtagaagaatgtttatcacattcattaaaccatatatcccatggtgtgtgtgtgtgttaaacatgatgtaaactacaatatttgataagtttgaatatttgaaaatgaagttagagaaagaaacttaaaagaatgaagtagaaattcttggatcagtttctaccattaagtcaaacttctccaaagacatgtgtgctttgtagtttatcattcctgaaatacaatatttaagagtgacttaaagaggtttttttttgccgggcgtggtggcgcacgcctttaatcccagcactcaggaggaagaggcaggcggatttctgagttcgaggccagactggtctacaaagtgagttccaggacagccagggctatacagagaaaccatgtctcgaaaaaccaaaaaaaaaaaaaaaaaaaaaaaagagttttttttttttttttaaattatccttaaatttaattagggagagggaatacaagtggatatagcttatgagtacgggtacatgtgcatttgagctttgaggccacaggaggacttaaggtagcctgctctatcacttgctgccttattatttgaggtagggtctcttgttgagcctggagggttaccagcaagcactatctattctctgtctccactttatttatgtgtgagtatatatataagcacacatgtgtagagttgcccagagaggccagaagaggatgtcaggtcccttaaattggaattactggttgttgtgagcctccctacttgagtactgagaatcaaattcagatcctctggaagagcagcaatagctcttaactactgaactatcttccaggcacaccctcagagctttttgatttatgtaatccagtatctatttttatttttgtttcctgaacgttttagggtgtttataaacaacaacaaaaaacaagcctatttcaacatcctgacatgtctcctctgtgctttcctctggcagtttcagatcttacataagtccagaatacatttttacttggtttttgtaactgatgagaaagagggatatattttcattcttcatgtggatgttcagttgtctcagcaccatttgttgaaaagattgtcctttcttccagtggtatttttaacatgtttgtcagaagtcaattggctgtagattgatgaaatccttccactctttacaacatgagcaaataccctgagtttaggtcttgtgttatttgatctttaattatttagagtgaccactctctttttaaattaaaaaaatatttttatgtatgtggatgttttgccttcatttatgactgtgccccaggtgcatgtctggtgctggtggggaccaaaagaggacgttgaattccctggatctagaattacagcctgttgtgagctcccatgtggttgtggtcttctggaagaacagcaggtgctctcagcagtttctgcagccccccccccttttttagcatgtagagtgcatgccatggtgcactgaaaaggcaagagaacaacttgtagaaattctctccttccacagtgtgggttccgggggctgaactcaggttcccaaatcttggtagcaagcaccagtacttactgaaccctctcaccagtctttgtgtcatcttttaacctttcttgttgtctactattgtcacaggatatctgatcactttgtgaaccctgagattgtgttatttgctgaaaatacctgtttgtagttgtgtggctctgcccttaagacacatgtctaatccctttgtctggaatacagatactcccttagtatacacctttaatttctcccccgccccccaaatgtaggtcaagtttgtttgtagaaggaggcacccatatttgaaagtgatgtctaattgagtagcagacaaagtgatgaatctgaaagatttgacagaataggttctgcccaagaaaggaaagggaagctacttaagagagagcggtgcagaggggcagagtggagttttaccaggacagctgtacagagacaggttttagagagaacaagctagacacaagtgaagacagaatgagaaggaatcagagtagaacaaatggccaaaattactatgatgccaagcagagcaatccaggtgaagctgggagaaaccagagtgaatcaatcagcttggagaggagtttgatccagtatagccgagttgaaccattcagagttcagaaagaactagggaagggattttacagtattaaatctcagaggctgaaaacattctaggcctagataagattatacagagtctagaaacttccaggactaggcccaggtttagcagctacagtaagcctctgagacgacaatacaggaaaataaaggatactttcacacctctgtattttggtctttttttcccctggcctttcactaatctatttagtctcataaatcacaaatctgtggttatgcattttctttaacctaaattttaggagttttttttttatcatatgttttaactttcattataaatattagtagtttagtacataatatcccacacatccttttctgaatttagaatagttccatcttatacatgtgccatccatgtataaatgtgctacaatttgtagccatcagtttaactttgcgattgttgtttatatctgtagcagaaggagacatatagatataagatttgcttgccactgtaatccttagcactggacatagcaaagaataaaagagctaaaataaaaatgcctctttttaaaaaggaaaagaaagacagaccaggtctccttgtataatcttggctggcctcaaacttagatctgcctacctcttgcctgtccggtgatgagattaaagatgttagccaccttgccaatatctttccatcctatccacctccaacacttcctcctactttaccacttctccaacacatatcctttccttctttacatcctgttttctgaagtccagttagtgctttcctgtgtgcacatgtgtgtggggccatccacaggagcatggacaacctaatagaggtcatgcttgcagagaaaaatgacgagccccccccccattccccccccccccccccacacacacacactttgcagccattatttgcacttgccaatagtgatagaagcacaggagcctgtcttccatccatgctgtgttgttgacttacttgttctgctggtcggtcttgtacaggtaactacagctgctgtgagtttatgagtgcagcacccatgctttgaccaaaagacagtgttttacagtactcctctctaccctctggctcttggttctttccacttactcttccccagtgtaccttaagccttaaggagttgatataaatattttacttagagttgcacctgaaagtcatttattctgtctagctatactttctgggggggggggggactgatttagttaagagacagaagaattgtaaataacagcatataaaattatttttctccaattaatatattgtatatttacatgcataaggaaacaatgggaaatgaggtgttttatagatttagagtgataatgagaattggaaagataagtaataaggtaagagggagattattttactataaacattttaaaaacatttgactggcttgttacttgggaaaaaattttaagagtattgattgatggcatacttgcctagcatacacaggtcctaggttctatctccagtaccatacagagaaaactgttgtttgttgttcgggtgggacttgttactgtcagaatagttacttcaagaccatcctgaattacatacgctggtggaggagggaagattaaaagagtattcatttcctctctttaaactagaatttaggcctgacagttcgatttgttaacacaaaatagctatgaggcttatcactttcgagaatacagactggggtgctggatctccaactttgtctgctatatagcttttgaatgaagttacaagtcaagctccctgtctctttaatctcctatgtgtctgtaatggtaaggataagatggtaagagattaagattttagctagactatcttgcttaatctctatcttaattaattgtgtgtgtgtctctgtgtctgtcagtctgtctgtctttaagagaatggggatctaattccaacctcctacatacagactttaaaggttacacctttagaaaattaattcttctgggaaatatgtcctcctttaaaatagaagatggaactgattattttatcaaaactgagtttataaaaatgtacgaagatataatttgtaacattaaaatgataaggaaggttgtagagtcatgattgacttcttttcaacagtttaattaaaattaaaaacagattattctaatttttttcctttctctgttttccaggttatatttcacactatgtgctgactgtatctacagaagatatttaaaaaaaagataaacttttttccaagattttgattccagtggaatctttgctttagattttttgtgtgtgtgtgtgcgtgttagtgaattgtaactccagaagcaatgcctgtacaagctccacaatggacggatttcctttcctgcccaatttgcactcagactttcgacgaaacaattcgaaagcccatcagtttgggctgtggccatactgtctgcaaaatgtgcctgaataaactccaccgtaaggcttgcccatttgaccagaccactatcaatacggacattgagcttcttcctgtgaactcagcattactgcagctagtgggtgctcaggtaacttaatactggttattgtctgtaattgactgattttagttatatgtgtctttgtgtgggcatgcttattttaatgtagatatagatggttgcatacagcaatatttataaatatgtatatacttggattattagatttggatattttcttgcctcattagcctcattagccaagataatcttaaggacaccatagtcccaatagcagcatacatgccttttgtttaaatattggtttctaatacaatatttaataacaggaagcagaactcttgggagggatggtcaattcaagggctaagacagcaagtccttaaaatgagcatggagtgtcttgtgcaagtattctaacaaagtgggactatgtcaaaagcataccagagctggttgaaagagctcccggtggccagagctagaagggtttgagcaaaataaatgggtatgttactgaattataacagtaggaaaagaagtcaaagactttatgtagataaaatggaaatggaaaacacaaagatacagctatagtttttaagttttcatagttctattttatttcttgcgcctctgattttattttatttaggaaatttaaagtcattgtcctagagcccattatgtttatgccagtctttgaacccaggtttcttctaagtttgagtcagtttgcatagtctatagagaaagaaaggcaaagagcactgttttacctgaggggagtcattacttactgatttttttcctttcttagcttttaaaaggttttatttttactggatattgtggtatgtgcctttattaacagcactgggtagaagacaggcagacatttcttgaattcaggccagcagtgttacaatagtgagatcttgtctccaaaagaaagaagaaaaaaaagggcattttttttaaatgtaactgtgtaccccatgtgtccaggtacccttggaagccagaagagggtattggatcccctgaaatcacagttaaaggcagttgtgagctacctgatatgggtgcaggggaattgagcttgtgtcttccagaagagcagcaagtgctcttaactgctgagctgtctccctaacccttaagaagttattaaatacatcttaatgtatttgggaagtggatgcccatgtaaccaccattttgatataactacaactgttatctaaagcagagataaggactgcatagcatgttcacaagtacagtggtgtttgaaaaaaaaaggggaggaagcaggaaataaaacatggtaagagatgataaagaagaaggatgaagaagaggaggaagaagaaaagaaggaggagaaggaagaagaggaggaagaggaggaggaagaagaagaagaacaacaacaacagttttttcccaactgcatgtgcacaattcaggcatgataaagacttaaggaacagccataaccaatagaattctgaaattaaattttaaatcatgtattttaaatttaaaaaggaaagaaaactaatcatacaagaaggaagaataaattagagactcttcaggttttctgtaagtgtaaaattacaccccccacgaccaccaccactaccaccagtgtgatttttcaattaactactgctgtgttaaattctggagttgtggtttttacctgtgtgataatgtggtgaataattcttgtgggttttttgttttgttttgagtgtgttttctttttgattacacctctcttcttactattatatttttgtttgtttattgaatgattgttggggaggggagcacatagaggacagagacaaagaatcactttctctttccaccatgtgggtcctggaaattgtgctcaggtcagacttggtgggtggcaagcactttcaccctttggcccgtctcgatggccgtctcagattatatctcttaactttatcactgaaagtgatatcatctgaaaaatatttaatctctggcttcaccacctgctcatttaagtaccacgtgtgctcatttctatgactgaagagcagttttgatggataacctacaccaaatacacatatttatgttagagaaatccagcaaatgctttcgcagtcaggtgaactggatcaatgtgaccagaagtaagtcatattgatagggaatctttagcatgctacgatgaaaagggtattttttctctctctggacttactgccaaacatatctaactccagtctccttgtgagaaaaatgagatcccatcaaaagtcagtatacaacacgtatccccagtagtctttaaaacctccaatcatcaaaacccaaaaggaaccttataaagagtgacacacaatcaagtattctggatgagctgctggaacacgggaaggctgttaggcaaaagtaaggcattctgagtaaaatcagagtttttaactataatgcgctaaattactatagccagattggcatattaatatcaaagagaacgttataatgagaatgaggtgtgggatagtaggagttctctgaactgtctttgtcattttctgtaaatttaaaatgcttctgtgaaactgcttttgttttgtttgtttgtttggttggtttggtttgtttttaaccaggaaaaaaatgattaatcctaccgctaatcaggaaaatagagatttagataacagcagggtttgtttttgtttctgtttctgttttttttgttttgttttggttttgtttgtttgtttttgatcttcccacaaaccagtgtctgaatggtggtcccatgtggtcatgcagggctcttgcatgtgctagggagggtgcaatctgtcaggctctggaaaatgcgtacaaccctgtagctatagtggctgcacttacaggttatcaaaccagatagttttaacacatacatacagggggcacctgcagaggaatatcactacagtctctaaaagcaacaagttaaaaatagcctaaacatcagaactgattcactgtgttgtctataccagagagttattagacatttacagatatcaccacaaatctattgcaaaaacaaagttttttttttttttttttttttttggtttttcgagacaggacttttctgtgtagccttggctgtcctggaactcactctgtagaccaggttggcctcgaactcagaaatccgcctgcctctgcctcccaagtgctgggattaaaggcgtgcgccaccaccacccggcaaagattttttttcttaaaacaggatcttatgtatcctaagccggtctcaaactcactgtgtaactggccttgaactcctgatcctcttggttatgggtttgtgccaccatgcctggcttatgtggtgctaaggattaaatctgtgtctttgtgcatatgaagaaaatactcttatcaattgagccatcccagccctcagatcagttttaatagccaatgacagtttgggaggcagagtctgtatgtttgaggtcagcgtggtctacatagttccagaacaaccagaattacatagtgaaacttgtctcaaaaacaaaacaaacaactaaaaattccagtaacaaagtctagcatcccagtaatttctgtaaattagcacacacgattggatattcaaggatatgttactatgtgtacagaaaataggaagaatccaggggaactcacaatatcacctccagaaggcacttagcaagaaacacagacaaatgacatcctttcttccaaactgtcttaagttcatactgatagtgttttcattagcgcctcccacagggcattgtggttgagaacatttcttaggcttcaaccttttataaaaatatcttcccaggtgtaaatgttgtaactcaaactactcaatcttgagtttacctttatatttgaataatacatttggctctgaaaacacaggttttccttagaaaatactgatttggatgacaatttgagggtctattggctgttctatttctatgttcaagctccctctagtggcccaaagtaacccctaccccttaaattattaaattcctttctcctacttggtaccgcacacaacacgcacacacaagcttcttgaaaagcaaaggcttgcaagcagtccattaagttttacagattaggactggagagttcttgctgctgaactgatttcccagctcccacaccaggcagctctttttcacagtcaccagtaattccagctacaaagggcccagtgccctcatctggcatgcatactcacatgcagtcacatacacgaaaggaaaaacaaaatttaagtctttaaaaaaattaacttattcatttcagtgtgtaatgcttgtttgttctttagctttaaatgtttaaattacatacagtttaatccaagatacttagctttggtattgtgtacaatatcaagtgtttttagctttgcttttgccaattgcatgcctcagtttgagtagtctgcattctatttcatcggtgattctaacctattcatcctgtatgccatctctgagattgggttgggttgtcaaaggattaagtgcatctacccctagcctatcttaaaacatttctcttttccttttttggggaatggggtagggtattgttttgagacagggtttctctgcatagtcttggctgtcctggaactcactctgtagatcaggctggccttaaactcagagattctactgcctttgcctcccagctgctgggttaaagttgtgtggtaccactccccagttcaaacatttcttatatacatacacacttttattattagttaaacagggctggagagatggcttggtggctaagagaacttgctacttctgcagaggacccagagttctgagtgctcatataagtcacttaaaaccttctacagccgggccgtggtggagcacgcctttaatcccagcatttgggaggcagagacaggcagatttctgagttcgaggcctgcctggtctacagagtgagttccaggacagccggggctatacagagaaaccctgtctcaaaaaacaaaacaaacaaaaaacaaaaacaaaacaaaacaaaaaaaactcttctacaactgtatttcctagagatccaacaccagcgtcttgcttccttggacactaggcatgctaatagtgcactttctatgcatggaggcaaaacactcatacagataaaataaatcagtgttggagagatggctctttaaatttttaagcatatatgtaagtgcctccaaattctagaagagggtgtgcagtaacgtgccccccacccccccgtgcgcgcactagcctcctgcacacagtttacatgcttagtattagctgttaatttttttaaacatgtattttatttatatgagtacactgtagctgtcttcagatacaccagaagatggcatcagatcccatctgatgggatggttgtgagccaccatgtggttgctgggaattcaggacctctctctggaagagtagtcagtgctcttaactactaagccatcgcttcagcccccagctgttaaatttttattcgttaacagtctttcagaagatggggttggggtgggggtgtatattgagtggatgagaacagaataagttctttgcattgactctgaaccagataggaagtagcaaattaaatgtacaagatattgacaatattactattaataacacaaaatgtaaaagttctggactagataatcacaagtctaatggggaactgtttaagaactagaaaatatttttttgtgacataaagttgaaaatgctgagcctttggttctttagaatcatagttgagtgagcggcaggtatgacaaatgtgtggctcctaccttcaactagacttgtcctgtgacctaaacaggaaagcccagaaatagtgcagggagccttggccaccaagggcagaagcacatcaaactcccacagatagaacagagaaagcctttccatgaaacatgactcttttctaactccactcgtgactagcctaaaatttggtttcttgtttatatacctctggctgttgccacaattccataacaacttttttcttaactattgtttgctcctgccagctttggtggcacacatgcctttagtcctagcactatgtgaatttatgacagaacaaccttagtcttctaggaagttgaaatataaaccagagtgaggtggcaggagggagcaaatggcagaaagagggatgttgagggaagggaaagcagattgttttgtgtatgtttgagatagggtctatgtagccttggttgccctggaatttactatgtagactagactggccttgaactcagatgtctgcctacttctgcctcctgagtgtgctgggattaaagctatatgccaccacactgactgagagagaatataagagaaaatattttaaatattttcaccacaaagtatctgaaatgaaaattttcttaattagcctagtttaactattgcaaattataagcttatatcatcagggagtcacattgtacttaataaacatttatggccaacactcaaacatttcagtgtgctcgcatcggcagcacatatactaaaacatttcattaattttgaaaaatctacattgaggcactactttgtacccaatgccatggttctataagaaagggaaagcggggcatggtggcatacacctgtaatccaaccacgtgaaaggctgaggctcaaggatccttgtgagttcccaagttgtttagaccctacctcaaaataaaaaagtgggtgatatgtggtaagtatattaaatggtatgtaagcaggttacctgttggagcccacataagtaccatgagttatattcaaataatgaaatcataattagcaattaaaataaatgaaatattgaggactaagaaagtagctcagctggtcaagcattttccttacatgcatggaatctttaatccccagaatccagatagaagtgggtatggaagctagagatatgaccccatgattaaaagcactaactgatctccctgaaaacccaagtttgagtcccagcacccacatggcagctcacaaccttctgtaacttacatgtgtggtacacagacatgtgcaggcaaaacaccaattcatatcaaataaatattacaaagagatatgtgttggcacacttacattgtcaaggctgaggatccctgggatctccaagatcctaggctagccagcctagcctacttggcaagttctaggccagtgaaaaccctttctctaggtatgtgagaaacaaccactgaaattttcctctagtttctgtacatactcaccaaaaagaaagtgggtacataccacacttttaatccctatacttcaaatgggtctggcataagttccaagtcagccagggctgcacagttgagcgagaccctgtctcggggtaataaagggataaggttctttttggggggagggggcagagtgatgaagaaaattttcaatttagttgctatagttattcaactgtaaatttactaatactgtagatcattgaattatatatgcaatctagttaattatatagtatttgaattcttttaataaggcttttatggaaataataatggataatatatgcaagtaaaagtttgaaaacatttagcaaatttagtagttttaatgttgtaagcacctatactataagtgggtaagttgtactcagcaaaatgtttaatataaataagtggaacattcaaatatttcttttgttctccagatccctgagcaacagcccattactttgtgtagtggggttgaagatacaaagcattatgaggaagccaagaaatgtgtagaagaattagcattgtacctgaagccactcagcagtgcgagaggtaaatgtagttataaaacccatgctaaacaagtagctgtttgctaatttgttttttgagacaggatttcactatgtagccctggttggcccagaactctatgtagaccaggctggcctcattcacagagatctacctgcctctactttcaagtgctagaattaaaggtgtgccccattcatacttggctgaatacctgttatagatacttgtagtaccaaaataattgagctacaaatgaatacaaatgtatgaaacctttttctctgtctcgtccctttctctctcttctcttccatttctactttttcccctacttagttttcagtgctaggcaagtgttctactactatacagtagtagatttaggatttatatagtactactatctatgcagcttgtcctagtgaatgctaatagaatttattcattataagctgtactggctagctttgtgtcaatttgacacaggctgagttatcacagagaaaggagcttcagttgaggaaatgcctccatgagatacaactgtaaggcgttttctcaattagtgatcaaggcgggaggtccctttgtgggtagtgccatctctgggctggtagtcttgggttctttaagaaagcaagctgagcaagccagtaagaaacacccctccatggcccctgcatcagctcctgcttcctgatctgcttaagttccagtcctgacttttttttggtgataacagctgtgtggaaatgtaagctgaataagccctttcctccccaacttgcttcttggtcgtgatgtttgtgcaggaatagaaaccctaagacataagccaaacctacttcatgctggataatatagtaaaccacatcatataaagtagtactaagtccagagtgtgtgtggtgttgaaaatataaatagctatagaaatgcttacatgatttagaagggctttcctttttttttttttttttttttttggacagttttggtttggtttggtttggttttttttcctttgaagacggggtctcatttagcccaggttggcttttaagttgctttatggccaaggatagctttgaacttctgatcatcttgtctctacaaggtagagacgtttgggaagtgttgcgaattaagccaggggttatgcattctagcagctgtatccccgctcttatttgataaactgattctttgtctagtttaggttgtatttgtagaaaacggtaagaaaatggaagttgttgttaccgtccagaaagagcctgctattaactatttgtaagataaaccagtaataatatgccagaactattagaacaacagtatttgggtcttggattaattgctgttttctgtcagtttttcttctatgattaaaatgagtaatagtgttctgaatgccataatgagtgatatttatctatatatgtttgctttactttttaaatgttattgttatatggttttatttacctaattacttgtttgttaattttgatgttttgagacaaggtttctctgtgttgctctgactgccctggaactcactctgtagaccaggctggccttgaactcagagatctagctacccttgcctctcaagtgctaggtgtggatatccaaactgttggtttattatttactttaaatatgctaatgagaccgagaactagcccataaagaagccactccagaggaagtgctcctggatcataaaattgcactgtaaacctagaaatagcttccttgttctctcctccaggtgtgggtctaaatagcactactcagagtgttctgagtcgcccaatgcagaggaaacttgtgactctggttcattgccagctagtggaagaagaaggcaggatccgtgctatgagggctgctcgatctttaggtgaacgcacagttacagagctcattctccagcaccagaatcctcagcaactctcttctaatctctgggcagcagtcagagctaggggctgccagttccttggaccaggtatgtaattaaagtttgttgctttggctgcttacttactcttgctgggtattctaaaagtatagagaaaaatccttagaaatatacaaaccctcatcttttgttaaattctgtttcaagcattgttctacttgacaaccttggcttcatactttttcagagaattcacagtcttttctcttgatgaccaaagtttattccttttattagtcattaaaagtgtttttctctgtattaattatttatcgacttaatatatgacagaattgcccacaaatatggctttaaaatgtaattataaatatgttatattgtttggggttttgttgttattgttggtttggttttggtttgtttgtctgtctgtttttgaaacagggttttgttgtgtagccctggctatcctggaattcaatctgtacatcaggctggcctctagttcagagtgctgggattaaagatgtgcactaccatgtctggttcatggtattgcttgttaatggcatagtattatgttgctcttcagacaatgtgtttagttcatctttgttcaccatacattttgattgtaccatttttcctagcgatgcaggaggaagctctgaagctggtcttgctggccttagaagatggttctgcattgtctcggaaagtgttggttctcttcgtggtgcaaagactggagccacgttttcctcaagcctctaaaaccagcattgggcatgttgttcagctcctctacagagcctcctgcttcaaggtatgaacctaaactctagttcagcttaaaacatgtctagttaagtttgccatgtctccaaacttaagcattaaatttggaccttaaaaaaaatgcctgtagttttcaggaaataccagcatttcttttttttttttttttcttaaagaaggcaaagtgtatatgctctagttacatcctgggtttggtttgttcggttttggttttgtcctgtctgtttgcactggagggactgaacccagagccttgcacatgttagacaagtactatattgctgaaatacagtctcaccctttaaatttatatgaagagattactcatcttgttattccctctgtcttagttaggatttctacttagttagggtttctattactgtgataaaacaccatgaccaaaagcagtttggggaagaatttattttgcatgcccattcatgtgccacagtccattattggcagaattcaagacaggaaccgaagcactccatagaagagtgctgttgctgggcggtggtggcgcacgcctttaatcccagcactcgggaggcagaggcaggcggatttctgagttcgaggccagcctggtctacagagtgagttccaggacagccagggctacacagagagagaaaccctgtcttgaaaaaccaaaaaaaaaaaaaaaaagaagaagagtgctgctcactcagactgctgtcttagcaccatgaccaccagcccagggtgacactgcccacaatgggctggcctcccatatcagttattgatcaagagaatgtatcacaggcttgcttgtacaccagtctagtggaagcattttcacacaaaattagccaacatactcaccaagactgtaagcaaaattagcccagaaccactgaagcagtaataagatttttaaaagtttcttccttatgcaattgtacagtcctagatttcaaattgctatggaagctggcttaaggattgcaccagaccagtggtcctctttgctttatggggatcagcctcacaaatctcatatgcagtctattattgacaaggtagtgtctttattgtcccttacttcataactgattttggagtcttgataattattatcgaagttattttgtgtgtcttggtttgatgagccatctctcaagcttctaaccatgtgtgtgtgtgagtgtgtgtgagtgtgtgcgtgcgcgcgcacactcacacacacacataagtgcacatccgtgccatggcacacatagcagatacaacacaattttgtagacttggttttctccttccacttttatgtgggttgtgggaattgaatttgggttgtcaggcttatgtagcatatgcctttacctgctgagccatctgcttcctgggagttctcctctgtgtatgcctgctatatatggtacacatcaaaccaagacacacaaaataacttggatttttttaaatcataatttttgtctatacgtgtttatataaagtatgaggcttttgtcagttactagatttttgtgtgtatgtgtcattttaggtcaccaaacgtgatgaagactcttctttgatgcaactgaaagaagaatttaggacttacgaagctctgaggagagaacatgactcccagatagtgcaaattgctatggaagctggcttaaggattgcaccagaccagtggtcctctttgctttatggggatcagtctcacaaatctcatatgcagtctattattgacaaggtagtgtctttattgtcccttacttcataactgattttggagtcttgataattattattttgtagttattttatttaacaaatgaatattatcgtaaatagtatatgtcagagttctgtaaatgagattcagtgtgtccagatgatatgtcatagctagtcctatcagaatgacaatagtgttacagtgcttcaaccagtgctctcatggtccttctcatcacctctcttcctttattgcccaaagaatcttgagggctttgtgtttcctggaactggagttacagatacttgcaagctaccatgtgggtgctgggaatcaaaccgtatttaggagagcagccagtgctctgaaccactgaaccatctcttcagcccctaaccctgcttccaaatgcttttttgttttatataggagcttttaatccatgatcttccagatgtgtaccttgtggctttatgattcccattcagaatttttttttttttttttttttttttgtagatggtgacccttttatttttgctttggagaatgggtttagacatttaacatttttatgtatcactttgtatatgtttcatataaaattaatgtagcaatattgtataaagttacatatgtatttttattttttatatagttgtttaaaagagtttagttttcattaaagagaagcaagacaactcctttggagttaaatgagcaggaaaatgtaattcctcagtgcaaagtcgtaagaactgatacaagataataaagtgatctgggcttgtttcctgcatgatcagacttcacattgcaaagagcaaaacttctgatttaacagatgtagacagggtccaagaatgagcttgtcataaactcctgtgtgatgctcatgttctaaagagacagagtgagaactatttctgtcaaagtcattccttcttaaccatagtaaatacattcaaaaggtttctctctttcttctgcatcttcctcccaagtgctgggattaaaggcatgcacgaccactgtctggctccagtatatattctttcatgatgatgaagcctacagaattgtgcaaaggcttcaccatattaaatacactcacaaggtttctgtcttagtgtttccattgctaggaatagacatcatgaccaagacaactctcataaaagcaaacctttaattggggctggcttacagtttcagaggtttagtccattttcatcatagcaggaagcatggcagcatgcaagcagtcatggtgctggagaaaggctgtaagttctgcattttgatccaaaggcagccaggaagaaactgtcttccggggagggaataggagggtctgttttgcacttggtggagcttcaaagtccaccctcagatatccacttcctccaacaaggtcacacatctgaatagagccactccttgtgacaagcaaattcaaactcccacattccacttactggccccataagcttgttggagtacaggaatgtatggggaccatacttaaacatggcataatggaaaatacatgtggtccaacttcaaaagtccccatcatctataccagtctcaaaaatgttaaaagtccaaaggtcaaagtctcttctgagatccatccaatcatgtaactgtaatccccatgtctcaacttcggagcttgcttaaggttcccccacggcacccaacagcagtactcccagaataattttacatagaataaatattacctctcatgataagtttgataaaattttcagtaaccatgtttttattttatcacctgtctgttttggtataaagaccactataataaatatcccaaaacatgacagtttttgaaaaactggtagattgagaattgagaaattagttttattttgttttctgctttttactgtttataactcttccttgaataccttcatactagtcatggttctctagaataacagaacttatagaatgaacatatatatatatatgggatttactagaacaagctttttattgtgtgagtgtatgtctcattccttttttttattgttttattttttgtttttttttaattggttatttatttacatttcaaatattgtcccctttcctagtctcccctctgaaattctcattaagttttagagaaatacttaaccttcaagaatcccaaactaaatcagaatattttaaaaaatattctttgacaagttcatcttgatcatatctatttcagctgccctttctcatttttcctactcagaatgatacattcttcctaccttcataatctctttgtttttcacaataatcttccaagtccagttagtgacatcagcatacacacaagcttggggccatccactggaacatggtaccaggggtacgaacatccctaaagacacttaacactttcttctctggaaaccatcaactgccaataacttctctaggggtggagcctcatagtctatctctcataagctggaatgatggctggcttgatcttgtacaggtaactatagctgctatgagttcaggaggacaactgtgtcatgtctagaagacagttcacagcacgtcttctcattctccagcttttacatttttttttaaagatttctttatttattttatgtaagtacactgtagctgtctttagacactccagaagagggtgtcaaatctcattgtggatggttgtgagccaccatgtggttgctgggatttgaactcaggacctttggaagagcagtcagtgctcttaactgctgagccatctctccagccccagcttttacattctttacatccctttttttgtattctttggtggtggtagtggtgatgtgataagatatcctatttaactctgaatattcaacagtcatttattctcagaacttttacaagttatgagtctctaaactaactgttgtccacgaggaaagaaatatctccaagcagggttgagaaatgcattgatctataagcataaacaaaaatattgaggcagtttgatgacatgtccatctaacaaaacaagcagattcacccatagggcctgtaacctacttggtcattggcttttaacaagtttaaaatgccagatatgaataccagatgtagaacagcccatattccagttttaaaagcttcttggttaccccagtaactttcatgccacattaccttgatgagcaccttttgcctgggcaggttagctgataggtgagaccattattgacttacctccccccagcaccctgcatagagccatatagcaccatgaaagctagtcaagagggaggaagattccacatcttttccagtttgatctctctgtgtcctgcaatcaaatcataacaggatttttttcaactatactagacatttgaaattatttagactttaatatatgaaatttagtttgtacagtttatatatttagtgttctgatatttggtcttaagaacttgaactcattcagtatgactattcagtggcattattcttactattatctgacattatctctctattatacttctaaatttcaggtatatggaaagtctaccaagaatctaactaatatatggggagaaagacctcctatttgaagagtttcataacagacagaaaatagtattgtacacaatgtaccaaactggatagaaagaaactgctttagatagcaggtgtttcagtctggccacagcagaggttaaaatgaaggtgtaaataaactgtggtttaaaagggttatctgaacttttggaaaattaatgtttacttttcttttaagttacagacccctgcctcatttgcacagagtgttcaggagctaacaattgctctccagcggactggagacccagcgaatttgaaccgactaagaccccatttggagttactcgcaaacattgaccctagtccaggtaaagctaagagaagttagtggactgtgtatgtgtccctcagtactgcttggttcttcagttatcttttgttatgtttcctctaaagtttcccaaagtagctttttcagcttttctttggctgcatttccattatcccatcttctcataataccttgttctattcattattctctttcttagccttttcttgggcatttctttctcaccccttcttgacctgaaaatatacctaatgacctgttacttgaacagtatttcagctgctatcctctcagagttcgctcctactatggaactgaatctacatactgcttactatagtttcctagtcactccttccagataggacttctgagtcctcaaactgctttgtttttatttgtaccactctaccccaccccatccacacagtgctgtctgtgtccttggaactgtttcttttgattcttagtctcaaatgttacctccatataaagtagattccccaagagctctgccagtgctcctgtcactgcagaccatttccccagtgcttcctgacactcagcatcatctgtctgtttcaaagtgagctcatctttgatgcctgctctcctagctatgtttcttttgtcttgtttgcatgttctttcacctgtcctacataccttttgagacatgggatttatctgtttttctttcgtaatttcctgtgacccacttcctgtttattcctaaatgatagctttagtcctttcctctgagacttaatgttttcaattttctctactctgatgctgtcagttcaggttactattgcttcagagtaaatcaaacttcacatatgcctttttagtaaggtgtcattgcttatagaatggctctgtctttcagagcctcttaaagtttcaccactccatgtttacagagctggtccccaatggctcaatcaaatcattcataccttttcatgtgtatgtgtgtggggggggtagcaattattttccccatttttattaattggcattctgaataatttaaaaaagtgcttgccaccatattagtatatctcctacagctggctggtagattctcttacacaacagtagataaactgttgacagacactctgtccctggacgagttctccagttctatagcactgtcttaaattcactctgatcagtcatttgtctccaccattctagtcaaacctattttgtcaagtttaccagttcacctccccacaacctgtgtgtgtgtgtgtgtgtgtgtgtgtgtgtgtgtgtgcaagcaatttaagagaaaagggttatttcagctcatagtacagtctattatagcaggcaagtcaaggcagcaagagcttgaagcagcttacatatcacatgcacaatcaggaaacagagagggatgaatgctacaggttaagttagttgtttctgtaaaagctaacataatctagattatccgccacaggtgcatacctagagacctgtctctctgctgattctagggccttttaagtcagcatcactaatcatcacagatgaaaaagtgtctgaaagctaccaaacaattaacttgattacactagtttagtactggataaaactctgcataagattataggttttgtttaatttttaattttatagatgctcctcctccaacatgggaacagctagaaaatgggctggttgctgtacgtacggtagtgcatggattggttgattatatccagaaccacagcaaaaaaggagcagatcaacaacaggtgaggggctactatttgaaatcttcagataagcagctttgggtatacctagaaactggctactgtaggtagagttacaaagcaaaaaaaaaaagttatgactattttaagactgactatagtggctggagaaaggatccacggttaagagaactggctgcttttttgagataacccagttcaagtccaagcaccaacatagtggttcacaacctcctataactccagttccgagggaatcagatgccctgttctggcctatggtaaacacccatccctataaaagaatttttaaattgctttgctttaaaaaaagattctgactatagatactgtacgtttgcatagcagttagtgttttaatttttcttaggtaattttatgttacatttcagcttgataatgtcactttttgataccaatgatgaatcactagtacttttcaaatatttgtagattttttttctgtgtagtattttaaagaatttcactaataatatttattatactatgtgccaaaccatcttctaattttaaaaaaatattgttttctacttatttgtatatatgcgtagagatgagaggacagccttataggtcctggaggcttgacagcatcactcactaaaccatcttgttggcccaaattttgtggtttttcttaggagccagctttatgttatatgaacactaaccaaatattagaagagtatacatttcaaaagtctttttggttttgttttttgtgagagacaaggtctcacataatcctctggtaatcctactgaatgagcataaagaccattacccaaattctttgatcaaattaggcaagcattattttctatccgtcaggactagcttcctaaagcatggtttgagaaaatagtatcaaacacaggatatttatttatttggggtttatattagccccaaaattgcaaggctaaggggttttcaaggattttgagttatgtaggaacttggcagaacatagagatcaaggtctagggtactgaactcctgctgagagtttctgagtgtatctgtcttgtctagaagacactgttgtgctctggtcctccctgacctctggcttctacagtctttctgccagacctctcatccacgatgagagtctctaagccttggtgaaagtgtatgtgtgcatatgacagagatgtcctgtttgtaactgagcattccacagtcacctgcactgtgaccaagacccactaccctgagaaacttctctgatgtggtctatgtagtgtgtgtggatgttttatctgcatgtatatacatatgcttggttcctgtggaggccagaagaaggtgtcttatttcctggaactggagttctagatggttgtgagctgccatatgggccctgggaattgagtccaggtcctttggaagagcagccagtgctcttaaccgtgagcccctgttagaactacttttaaattttaattttggacctggaaaggtcgctcagtaggcagaagtttttttgcaagctaggcatcctctgttcaatcctagaacctaggtaaaagtgtaaggaaagaaccaactccacaaaattgtcctctgacaacccccaaactaataatgaataattaaaatttaattttgaactctgattttcccccctcaatagtattgctctgagtagtttagataaatgtgtgaattagcttaagttcttctgtgctgtaagaatcctaaatggaaaacataaaaacatttgttactgttttgttttatgtctgatgttttgatcttggccttagcctccacagcatagcaaatacaaaacatacatgtgtcgagatatgaagcaaaggggaggatgccctcgtggtgccagctgtacgtttgcacattcacaggaagaactggaaaagtaagtatgaaaaccatgaaacacagacttgggaatagggaatgatttgttggctttaagaaacacagtaagaggggctggtgatggagagatggctcagtgattaagagcactggctgtttttccagaaatccgagttcaattcccagcaagtgcatggtggctcacaaccatctgaatttggatctgatgccctcttctggtgcgtctgaagacagaaatagcaatagcatatacacatacataaaataaatctttaaaaatatatataaaaggaataattgaattcaacacttaggaaatatttatgaattagtacatttcttaaaagttttttttttagttttcattatattgttcttataaatgggaagctatattttatcaactagatgacattagttatttccacactcacaaaaagttctagttctttttaacaattttaattgcttcttaccaattgtgtgctgtatttgtagttgaaacatttgcttttcatacaggtttcgtaaaatgaacaaacgtctggttcccagaagacccttgagtgcctctttgggtcaacttaatgaggtgggcctgccttcagcacctatactttctgatgaaagtgcagtggacttgtccaacagaaaacctcctgcactcccaaatggaattgcatcgtcagggagcacagtgacacaactgattccacgtgggacagaccccagctttgattcttctctgaaaccagtaaagctagaccacctgagcagtagtgctccggggtcccctcctgacctgtacgtcttcaagtttcttccttgtaaactgagtagagggaaagaagagtttggttctaaccccagtggttccttggtgttattgtttgttcttctgttttgagtcaaagtctgtcctttaacttattacttcatagctaaggatgactttgaacatctgagccgcctgcctgcacctccaggtactggaatggcagactagcagcaccatgcccagttatgtgtgctagggattaaaaccaccaactgagctacatcctggcccagaaaataaaatgtttgcctttgttttattggcttttacttactttttctgcactgatgattttttttttaaagaaagattaattcctttaaatttgtagaagagattgacattcaaatatattgattttccaagtactggcagtctttttatatgaaacatttaatgtatattaaaagtatattttagagactttaaacttgtcttgtataattttgctcccttaggctggaatctgcccctaagagtatttctgccttacctgtgaatccacatcctgtacctccaaggggaccaacagatctgcctcccatgcctgtcaccaaaccaattcagatggtacctcgaggttctcagctatatccagcacaacaagcagatgtttattatcaggatcctcgaggaagtgccccagcttttgagacagcaccttaccagcagggtactgatctttcatttatatttatatgtatatgtatatttatatttatatttatttccttattctgtgatgagtaatcatttacacaggggcttcctttagataagagaatatttttaatatttggaaaacaggttttcatgatcaactaaatttctttgcctgcttaaagttgtgtaataaatgtattttagccactcaaatttatcatatggataaaaaaggataaaatttatttattttatagaaggattaacatttacagagcaaatatactgtgtaaagctaacctaactcttttcaagaatgaaaaaaaaaagaaagtagtggatgtaaactaaatttacagtatgatttccttccttttaattattgatattggccttgaaaaggtgctgaatacaagtctttagagcagtgattctcgatctgttcgttgtgacccctctagaaaagctatttccaaaaacattacaattcgtgacagtagcaaattaaatagttatgatgtagcaacaaaaataatgttatggttgagtcagcacaacatgaggaactgtgttaaaggtttgcagcattaggaaggttgagagccactgctttagaggttctgtagtctagggtcagcttactagtaaagtgtgtgtgcttgtacatgcctttgatcccagcactcagggggcagaggcagaagcctgatctacatagttccaggatagccaggacaacttagtaagactctgtcttacaatcaaataaagcaaaacaaaagattaaagggaatactgatatttatttcaaactaaagtattgaatctcatcaaaattagaggctatttttgtttttttgttgttgctgtttgtttttaatggtaatagattaaagtatcttttatttccttccctcccccccccctttaggttacatatgtcatctctgcattcaaaagtagttcatttttattgttttgttattgcttatttattggttggttagttggttttctgagacagagttgcttgcagtatatataccaggcttgctttgaactcactgtagctcagactggccttgaatgaagatgatcctcctgcctcaccctcctgagtgctgaaattgcaggcatctagcataagaatagattttgatgactgatagtggttataaaagaatctgacttgatttttttttttaatctcttgaaaaaatatatatgtttttgttcaggcagccaatgtgtagctttatgctctatgaggaagagttcagttacaaaagcagaaatctttgtagctatattaagcatgaaaagatttagtggagaaatgggttctttccatgttgatggaagcattagagatgcagacttaaactaagtctttaggaaatgtgtcctagaaaagcactactttgctagatgtagagagcagagataaaaccttctgccttaactggaggtttctgggaaatgtactgctagaactcttgtctcaaggactctagagccagagaagtcactagatgtatagagcaaagtgctgagcgtttcatacagtatacttgaacacatttctagcactgcctccccttactacctcccatccctttctacacaagttggaggctgagtgtttttatttctttttctcccatcaagttcagtttatgttgcccagctaatcttgggagtgggacctgctctggtcagcctacaagaggtcacatcagtaagaaaaatggactctccctctcccaacagttatcaaatgctaatagtttctcagctagtggtaggattgcatattcctatttcctcctctatgctaggatttttttttcctggctggaacttgtgcatactgtcataattgctatgaaaagtggctctttggcatatcatatcttctagctcataatagttttgaagttgaaactctatagtagcagggcctgaaagaggtctgtaattccagctactgaggaacctgaggcaggaggatctcaagttctaggcatgcctgggctacagagtgagttcaaggatagtggtcttcagaagaccctatttcaaaatgaactatttaaaagggggctaagagggggctggcgagatggcccagttgttaagagcgccgactgctcttccaaaggtcccgagttcaaatcccagcaaccacatggtggctcacaaccatctgtaatgaaatctgatgccctcttctggagtatctgaggacagctacagtgtacttacagataataataaataaatctttaaagggggggggggctaagaacctagccgagtagtggagtgcttgtttagtatgcatgcagtcttggatatgaaaatccacagagttaaaactaaagtagaacctgagtttcaaggatgcttgtgaaatttaatttttaatttccagtaagtgcattatattaagacaaactagaagaaaggatcagtctactatttttgactatatgtatattgatcctttccatttattttcaataattatttgttaattggtagaaaaagaggttttccctgggattgaatttcaggaccttgccaattccaggtaaacactaagccccactccaggccctaaggaaaatatttgctttctaattgtcacaaagctattgtaactatacaagtagtgcaaaagtttatcaaaattaagtagattattaatacttaagtgacttaatgtttttgggtttgagttttggtttctttgtgtatcctggctgttctggaacttgctatgtagaccgggcttgcctcaaactttggtatttgcctggctctgcctcctgagtgctgggattaaagatgtatgccaccatcgcccagctgtgttttaatgttttaaaaggaaaaaaaaagcttatatagaaaaatagaagagctcattattgttttgggttcttcttttgtgttgcacaggtatgtactatactccaccaccatgtgtgtcccgctttgtccgacctccaccatctgctcctgaacctggtcctccatacttggatcattattcaccctacctccaagatcgtgtcataaactctcagtatggcacacagccacaacagtacccacctatgtacccagctcactacgatggccgccgtgtataccctgctcagtcttacacaagagaggagatgttccgggaaagccctatacccattgacattccatctgcagcagtgccgtcctatgtacctgagtccagagaacggtaccaacaggtagagggttactacccggtggctcctcatccagctcagatcagaccttcataccccagggtaagctgtattttttttcttacctagatttaatttactttttgtatatgtatgtgtaattggtgtgtgagagcgagcacaggtacatgtacaccacagcacacttaggtcagaggaaaactcttgagcataagtttactttccacgctgctagctgggatctttcttgttgctactgctcagaatattccaggttagcttgtctgtaagcttccagcatctgtttattcctcccatcccatagccatcctgggattacatgtgtgcccatggtttccagagatcagccttgggttgtcaggcttgcaagccaagacagtgcttttgcccgttgtgccatcttcttggtcctgaaatttgaagttattttaaaaaacaaaatataaatctaaacattcttcgtttgtgtcctaagacttgatgagttaggaaatttggaagatcttgggagagtttaggttgaccttttttttttctctttaatattgatatttctaaatgttatgatgggtatatattctgcgcctgaattcattcattctatctatctatctatctatctatctatctatctatctatctatctatctatctataaataatatggttaattaatgtgctttgggattctttgtcaattttaaataatcttccaattaccaggatcctccttatagtcggcttcctcctccccaaccccatcctagtctggatgagctacatcgaaggcggaaggaaataatggcccagctagaggaaagaaaagtcatctctccacctccttttgcaccgtcaccaacattgcctcctgcattccatccagaggaagtaagcatattatttttaatcctgcttatagtttaccattatcactttttgtagcctgtttaataaattatgagagccaagcagaggtagcacacacctttagtcccaggaagcagagacaggtagatctcttgagtttgaggcctgtctggtctacagagtgagttctagaacagccagggctacacagcgataccctgatttggaaaaaaagagagagaacgagagaaaggaaggaaggaaggaaggaaggaaggaagaaagaaagaaagaaagaaagaaagaaagaaagaaagaaagaaagaaagaaagaaagaaagaaggaaatctgttcccaagaagatggttatcaaatttcaaaattatgaggctattttctggttttctccgagggagtcattgttttattacacatttagattcataagccatttaaaattgagttattaaatgaactgttagaatcaaagtccatttttcctcggcagggatagctcattggccttataccaaggactgatttgagcatccttttttcagtgtcccatagtcagctttcctataactggttaattagggtaggtgtggtggcctgtagttctaacacagtaggatactgaagcagaagcaagccttcactgcatatagagaccctgtctctataaaagtgatagatagccaactgtgattctgaaatctctcctttcattggtctatttctgtctttataccagtactgcatttatttatttatttatttatttatttatttatttatttttctttcttcctttttgtgtgtcttgggggtgagggtgggcatatgtggaggtgagaggatggctgttaggataggagtcagttgtttggtttcaaggatccaaacttaggttgtcagatttgcacatacttcacttgagctgtctgactgatccctcattcaatagaatgttctacttaagttggactcgttggtataggttctcctagtattcaattcaaaaataaataaacatgttgggatctgggagtttagttccttaaatttttaaataattgagacataaattaagatgtatttttaatctagcaatggagaaaccagtagtgtggttttaaaaaggtaggaaagatacacaaatacgggtggatggtaaaagtcacagggaatgtttggtttatgtaccatagtgctgtaattctgaccattacatttatgtttgtataaaatagtgctaatagatttgttttggtttggggttttgtgaaacagaatctcacattctagactaggtttaccttgaattcactcaagctggcctcagattcagtgtctcctgccttagccttccaagtgcttggattacagatgtggacaactatgctcagcaaaatattgcttatagctattgtgaatgttagttgtcctaatttttttcatttccggcactaatatttttcactggttagtttttcgagggatttaccagttatatttagttttaattagacagcctgagctgagactgtagatcagttggaagagtaattgggtagtatgcacaaatctctaagttcaatcaataatgctttctttgtaaattgagcaaggaggcaggaggatcaaaagttctaggtcaaccttggctacataacaagtttgaggccaacctggggtacatgaaaccttgtctcatactttattcattagttatacataatgaatctaattggagtatagactttgttttttaaatcaaatgatatgtgtaagaaaatgtgtaacagctgggcaatggtggtgcatgcctttaatcacagcacttgggaggcagaggcaggtagatggatctctatgaattcaaggccagtctggtctataaatggaattctagaatagccaggcatatacacagaaaccctgtcttgaggtgggggaaagaaaattatgagtaaacaatgttgccaactgactacatatgataagcatgaaaactggaaagtgaaagctaggtgtggtgatactcttgagctaccatttcaagacaccatttcaaaaatacaataaagttgctgggcagtggtggtgcatgcttttaatcccagcacttgggaggcagaggcaggcagatctctgagtttgaggccagcctggtctacagagtgagttccgggacagccagggctatacaaagaagccctgtctcgaaaaaaaaaaacaaattaaaaaaaatacaataaagtgaagattattatacacaataaatagtaacttgtttaatgtatgaaggtaatctaaacagaagttcatagtgcctctgtctcttagagtgctaggattaatattgttcaccgccacacctggaaagctctatatttaagcttccattctgattataagcagcctatatatatagttgccctaaattcatacattacaggaatacatgacatagaaataatgctttcttcaaattcccattttctataacagccaacagttttgttgtgtatttcaacttttttatgtgcatgaacacatttgctggagtggggtggagttgtggattggttttggttttgggaaatctatgttaaagtgaatttattcttttttgtagctgcataatatataatattcaggtagaagagcctacttgctagatattaatatattctaaaagttagctgttctacatgagctaagacttttaaagtgtttagcattataaaagtatataaatattacaatttaataaaaaataattggcgttggaatgaaatattgttattggataaccacagaactttagtcaagaagataaaaatgaggccttttattcttttacttaattgaatcaaccttgggccagaatgtatttaggacagggaatactgctgctaaagaagcgtcagcagagttgctgcatcatcccctacctcataagccgcatgagatgcaaagatgctctcagctactgtagctgttactaaagcacattgagggcggcctagcaaatgtacatacagcatgatacagatttatctaagacagtggaggaaagtgtgagcaaacttcttaagatcctagcttgatttgctgaaggaagttgaaactcaatcaatcaatatctctctctctctctctctctctctctctctctctctctctctccccctccatctccctccatccatcccttcctccttccctcccttccttccttcctttttttttagctgccattaacaaatatgaaagctaaaataatcttcacatttttcagtctataaaaatatgttctgaaacttaataatcaaataactatcactatattgttttaagttggtattctagacattccacgctttttctgctttgttaactcatagacccatttcctattttccccctctatagtttttggatgaagacttgaaggtagccggaaaatacaaagcaaatgattatagccagtattctccttggtcatgtgataccatcggctcctacattggaaccaaagatgcaaaacccaaagatgttgtggcagcggggagtgtggaaatgatggtatgtgtaatggctaaacataattaatagaaatctagatacagccgggcgtggtggcgcatgcctttaatcccagcacttgggaggcagaagcaggtggatttctgagttcgaggccagcctggtctacaagtgagttccaggacagccagggctatacagagaaaccctgtctcgaaaaaaaaaaataaagaagaagaaaaaaaaattatagggacaactaattgagctttgcttttgtttcatttaaatataaagtatactattatcttgacaaagaagaatttttattatatatcattttaggtaacaatttcccaacaattagttgttcagaacctaagtttatttcagggttggagaaatggctcagtgtttaagagagcatattgctattgcagaggacttgagttttgttccctgtttccatgttgggcagttcacaaccacctataattctggctccagatgatccagtgccttcctggcttccatgggcacctactcagtccatatacccacactgatgtacaaagacacataattgaaataatgtgtccagcagtggtacttctagactttaatcccagcacctgggtaccaaatacattaaaactcttcttacaagtcatatgtttaaacaaccaacttggttaatttatttggtaaagaaatctaaaatccttttttaatgtatattttttattattttaaatgagaatatgatagttgtgtagcttgcaagtcaaggtttattaattttcccccatagcattaaaattttgcaaaagtagttaacctcactaatctcatttttctccttcactcctccctgtcagtaagtaacctcttccctgagtttagatgttattacttagatacacacacacacacacacacacacacacacacacacaccttttttctttttctttttttttttaaacaaaaaacccactgggttttcctgtattgtccaggatgaccttgcataaagtatccttcttgtctcaccccatggagtagctgagactctaggcaagtgccactgtactcagcttctgctctttcctttttgagacagcatctcactaaattttgggttggctttgaaatcactctgcatcgcacagctaatctcaggcttgtggtgctcttgtcttagccttactagtagctacagctatagattcgtgttaactgatcttttgccattatgtataatttttcacttcattttttttaaggttttttttttagatttgcttatatttatatgtgagtgttttgctcacgtgtatataagtgttctacatatgtgtctggtgtcctcagaagttaaagagcattagatagatatcctggaattagagttagggatggtcatgagctaccatgagggtgctgggattcaaacctggtcctttgcaagaacaagctctcttaacttctgagctatctctctaacccctgtgtagagtctccttgtgcacatccatgaaagttttgcttagacatgtattcctggccaaatggatgataagcttgaactatatatttaaaaaaaaaaaaaaaaggctggatgtggtggtgtatacctttaatctcagcagcaccggggtgtggagaggggggcacagagatggtaggtgacagagtgagactctgtctcgaaagaaagaaagaaagaaagaaagaaagaaagaaagaaagaaagaaagaaagaagaaagaaagggaaaggagaggagaggagaaaagaaagagagagaaagagggagggagggaggacagtacagacagacagatttgtgtaggttttcataggtgatgtttacctagctgtttcaagacaaaactagttcaagtagatgacagttcagagtaagaaagaataattaaatgaaaaacaaacctgcaaggggactgggagtatgacagagcaaggtcctgggctctgctcccagcatcaagtaaggtaaaattaagttgaaacaaaatttttgatgtgcttcagtgagcaaatgtgtgcttctacatcacaggaagtcttttagcagaatgagttgaaatagaatagtaatgtaagatgctttcaaaaggggtatcacaggctggagagatggctcagcggttaaaagcaccaactgctcttctgaaggtcctgagttcaaatcccagcaaccacatggtggctcacaaccatccataatgagatctgatgccctcttctgggatgtctgaagacagctacagtgtacttacatatactaaataaatatatctttaaaaaaaggggggggggtatcacactgaagtaacattaccaaagtaatgctaattccttaaattaggaaaaataaaataaaactactaacctagtatagatgccattaaaagtttttccagatacatgaaagaagccttaactcagtgcctctcagcattgacttatagctcaggggtaaagtgcttgcctgacaagttaatgttcatacatatgacttaggaatgggtagatttatcatctactatcatctgtctgtaattgttggtcatataattcttactgtgatctaaaaccaatgttttatatgacatccaaagacagctaaagacttattcttactaataagaacatcatactcttattaacaacccctttacagagctggtagaaattatgctaaacatactctcatttttgctttttgttagaatgtagaaagtaaaggaacgagagagcagaggttggaccttcagagaagagcagtggagacgagcgatgatgacctcatcccgtttggagaccgaccaacagtctctcgattcggtgccatctctcgaacatccaaaacactgtatcagggtgctggcccactgcaagctatagcacctcagggagcacccacaaaatctattaacatttccggtaagaatcctagagtggtaattatgattctcaatgtaattctatcagtgcttttaagacttttttttaaagatttatttattggttatatgtaagtacactgtagctgtcttcagacactccagaagagggagtcagatctcattacagatggttgtgagccaccatgtggttgctgggatttgaactccggacctttggaagagcagtcgggtgctcttacccactgagccatctcaccagcctgcttttaagactcttaaaggcaattattaaacttttccctataagaaagcaattgcacttcaggcaattttaggagtataaactaaaattaactctttctatattaagactgcttgaggggctaaggtgtaaagctcagttgatagagtgtatgcctaatatatatgagaccctgtattcaataccccaaaccacataaaccagctatggcacatgccagtaatcctagtactggagagatggaggtagggagatcggaatgttcaagtgcagctttgggtgcatagggatttcaaggctattctgggctaatgatcctgtctcaagggggggggtgctgcttgtgacttttatcttaaataacttcattatttattaaaataagattcttggagtctgaggaggtgactggctggataaagaagatctgagtttggatccccagtacccacataaaatgtaggcgtgcgtgcgcgtatgcgtatgtgttgtgtgtgtaatcctagtgctttgggaagataatctgacaccaaccctcacccctacattcaaacactcgtgcacacagtgaaaagaaagtatgcaaaacctgaaggttcaatggggaagaaacaaatgcattgtcattttggcagacagctttctgcagagacagataccgtgtgccgctgccttctggatgatagtgccttagatgaatcaaactggtaaatgacatcataaaccacagtaaactgttcctttacagattacagtgcatatggagctcatggtggctggggagattctccatactcacctcatgcaaacatacctcctcagggacacttcattgagaggtacagccattcttgttcacttgttataaatatctgaaacatttagctttccttgctttgttttctagtcagtagtgatttcacaaaataaaactttatacaaaatttacctaatggtttctttcttttttaccaaagggagaaaatgtccatggcagaagtggccagtcatggaaaaccccttctatctgctgaaagagaacaattacggctagaattgcagcagctgaaccatcagatcagccagcagacccagctacgaggactagaggtacagacctacagatacttttttcttgtgtcaggaattttgatgtagagtaccactgtgtagcccacatggcttcagactcaggatcctcctgtgtggccacattggtacttacatcgagctttcagtgttcagcactgtgcccgttttgtgctctagttctgaagagctcccaagaatgttaagttggatataattttctttcatcgtgtatatgtattttgtggggtggtatgtgcacatgaatacagatgttggaggatctgcctggagctggaattatagcagttgttgtaggcctcctgacatgtatgctgagaacaaaacccagggcatcaacaagagcggtatctgatcctaaccatcaaaacacctctccagtctccttaaatagtaagttctgagacacagtaaagcagcacgtaattttaaagcctttgcctaacgttagtatagatatcccttcttcagaggattcagaactaaatttagttcttggctaatagaaaaagaatattgtctgagaataaacagtagtggaggaaaaaggaaagaaagcctgcctcaagaacattgagtttttatagaaaaaaatataggatttacatcatggaaaatagcaatgagaaagaaagatacacatttataattgatttctctttgaaataggaaaaaagattaaattatttttggtgctggaaatatgtcttaccattcttgcagaggatacaagtttggttcctgtcttacaactgcctataactcaagctcctggggatccagctctccttctggcagccataggcatctgcatttctgtttaatgtgtacatcgcaacattcacacacgccatctctgtctctgtctctgtctctctctctcgaaaataaaacacatcttttaaaactcactctcccttaaaaataaaatacatcttttaaaattaaaaccatgtttctcaagtgctattaagacaaaatgtgtttatagttgggttatttttactgcaaacttgtggctagtttagtggtaaaatactttgggtaaagtgttttctatgtggcatgaggtgcgctgaattatgtgtgtgcttggctttgtgcactaggctgttagtaaccggctggtgttacagagggaggtgaacaccctggcaagccagccacagccccctcagctgcctccaaaatggcctggaatgatctcaagtgagcagctcagcttggaactgcatcaggtggaaagagaaattgggaagaggacccgggaattgagtatggtgagtgctgaaggtggggaaggtggaatgaactctgtgactctagagctgattccaggtaccttgaggaataagtaatatttagggtgattctaataaagatgagttgtcatctggtggtattattattttaggtttgtcctttgtcaaagactttggggaaaacaagggaattaattagaaattttaaagtttctgtttaatgtactcattagggaagcagatgggatggttgctcttttggactctgtaatattaagatatgtttacacaataaaatgttacttttcatggtcttttatagaagagatatatagtctgtacactgttctctgtactgctttttcatgctagtttgcagcattttcaaaaggtagtgagaaaaggtgggttgtactgtatactttagtgtatactctctcatctacctgttttttattgttaattcttagtgaagtaggaatgactttttgtttttttaatccgtgttgtgtgaatttggtctaacccattacaccacagattacggactttatttcctcttcttttaaggagaaccagtgttctgtagacatgaaaagcaaactgggtacaagcaagcaagcagaaaatggccagcccgagccccaaaacaagatccgcactgaggaccttacattgacattcaggtaaagaaaggaacaggaacacttctatagactttaaccagagagagagataactatcatcctaccgtacacaaagtatgaatgttttgattcttaaaagatctattttttaaaaaaataagaaaatatgaatatattcattgggtttttttcaagacaggatttctctattcagccctggctatcttggaactcgctctgtagacctggctggcctttaattcaaggcatatatcaccactgctcagcaggagaaaagaatatatttttactaaatctagaattaaaattttactttaggagttagagtaggatatagctacgggcactggagaggctgaggtaggaaaagaggaatttgaggttagtctgggctacaaagtgagactatcaaaacacgtgtatacacaaaacttagcactttactggggctcagtacattttctgattacattttcttctcattgctttaagtgtggtcttatgcttttgacttataaaacataatatatagctcatttaatcattttttaaaaatgattaaaagccaacctactgcccattttattgctactgtttttgtttcattttcatgctgactattgagctcagaccctcacaaattagcacatattttttaccactaagctgtattccagggttatgttcccccctttcagttatgtacaaaacacttaaatttgctagtgttgtagggttagattagggtttgttggtcgtttgagacagggtgggattaggccatccacagtcaacgtttttatttgatctctcccataatacagtatttaattcatttgtatatccttatttattctctttggcatatttgaagatttgaatccttagtcctgtgttgatctcttgattacctagaacaagaatttataatataacctgacatggtggtacatgcctttattcatagcacttactgtttgagtttgaggttagcctggtctatgttgtgagtttcaggatagccaggactatgtagaaatatcctatctcaaaaattaaaaaaatcaaacagaaaagaattctaattgtcctgttgctgtcttcttgggttttggcttgtttgtttgtttgtttgtttgttttttgagacagggtttctctgagtagccctggttgtcctagaactcactctgtagaccaggctggcctcgaactcagaaattcgcctgcctctgcctcccaagtgctgggatcaaaggtgtgcgccaccatgcccagtgactattttgaatctatacgcttgcctaggttcaaaataaagttggtaaataggaggttggcactttttcttaaattccagccagcaaatattttaagctacgggtcttttgggatgttaggggctgtaggggggaggagtctcactacctgtcccttcctcccaagtgcttgtctctaccatgcctgtttgttttaactcttagttcagttttctaatatgtatatgcaggttgtgttctgctataacctatacgtatagagtaggaagcttgtcagttttagtttatcatctatgctacagtgtggatgaggagttagaatcaatatttggaagctatttatgtagttatttttattttggctgtttgagacagtctcattgtgtagctagccttggttggcctggaaccaatctaacctaaaactgataaagaccagctgcttctgccttctgcttgaactaaaggcatgtgctctactccagcctcatgtttttctacagtgctaaataataagccctattgattggattttatttagagtaattgcttttctctttctataaattccaactattttttcatgtaatttacagtgatgtaccaaatggatcagccttgacacaagagaatctcagcctcctatcaaacaagaccagctctttgaatctgtcagaagactctgagggaggaggagataacaatgattcccagagatcaggagttgtttccaattctgctccctagaatatgggcacctgcttctaccttctgctcctaatcagttcatggggcatagggatagaaaaatggataacttctaaactttttctctgagtggtcagtgaagtccaggaaaagcaccggaggcaatgtgcacaaacaccactactaaacaaacctgcacatagttcacattgatgcatttttttaattttaagaaaaaaaaattagcagtatctgcaagcaattcagattaaatttgtttttgttctgtgaatgaactttattttaataactttggacgccttggatccggggctttaaaaaaaaagaagatattatatatacactctgtttgattaattgtatgatcttaatgaagtaggtttttcttgtattttggtattattacatacccagtgtataattccttttccccagtcctttccaactctcacaaccctgtaaactaaaatagacaaaaatgcaccgtttccaagaattctgtggtaatagattgggttattagaaactgtgcagcaaactaattttattagagctattctttaaccccagccctgtttctggatcactagctctgtggatagatacttgttttttacaacattaaaagtttatttgagtggatatggttttagtttcaacttttcagagatgtcaacatgcagttgattgtttgagccacattttggtgtcaagcattccttgcattatctccttaaaatctgaaagcctatttagtgtttacaatgtttagttagatttaaatgaagattattttattttaagaatgaactctgaattggatataatggctcattcctgtaatccctggcctcaagatgttgaggcaggaaaaaacagaataagaagaaaagaaatgaacttcagcttgttaatagtgaaaataggcatttcctgttctcctatgtggagctcatgttggaaaattcgagctgtgtttacaaattaaacttgtcttgaaaccctagaatagaaaaaccaggacagtgaaccatactctaaagctgggagccggctcagcagaagagcaccggctgctctcccgggttcttggcagcacctgcagggtgtctcccagttccactttcagggacatgacacccttttctggcccttgtggacaccagacacaatgaagaaaattttttaattaaaataaaacttaacactcgataggagcttcagtaaacaaggacatattatttcaatggaatttttgttttcctttcaaaagcgttaaagatttggcagatagaaactgactgagtcttcagggtagttcatgctttggtcacttgtcagtaatcagaattactagaataactataaataacttgaagtgagtttttatagacctggctttctgacattaaaaatgtttatgaaaaagttgaagagtgaggaagaatttttatttagttctgctgcacatattctaatgctaaccactgtttgcttaatttactaagcccctctaaaatgagttcagcaaggcaatgtttcgtagaatcactccatccctctgattgcctgacgtcagtttccctttctagatgatgctacaaaacaagaaagcactggttatgtaataagttactgcattgctttggttgggtaaaagcaaacgtttatatttttcttatttctatttcctgaacccttaactctgctgaggtctgcgtcacctcagtctaagctctgtgtccatcatcttgttaattgaaacaagtgggtgggggtgggataagagtgggaggggtgggaagggaaaaatagtcctgccattgcctaccagtaggaaatccaaacagaacactcatttgagtagcgattatttaatttgcccagtcaaggcaccgtgtttatatactatttcacattgaatttgattatgccctacagacctggctggtcaaggatttgatatacacatattggcttgggattcgagctttcttttttatttaaataaaaatttatatatatattatatatatacatatatacatggctatatctgtatatatatcgggtatgttttaaagatttcttcgcatgagcgcagctgttgcaataagatgactgattgggaggtagaggcaccgaatgacggtgaggcatttctcagttgatgcatacattttccttttaattttaaatacacatttgtacatttgctttttttggacttttttttttaagataaaatgactcttacatttatactttactcattatttattgagatgaggagagaaatgttatgcctgacaggatttttatttttctgcatatctataaaacgccacattattggcctcttgccttcagtagacagatttgggtgggtcttacctcctttggacatttcaagataattcctaagtcttagaagcagatgggtttttgttgttgttgtttttaaaattggaataactagggggaaatctgcatattggttttcttggagttaagaataaaagtaaattttcattgtagtgtgtatgagacccccaaaatgtactctgctgcggtgcactagtatccttttaggtatatttttatttagggagaaaattagtcttttaaatggtagtatgagttccccaagcccctctctatagccagtctgggttgggtagaaagtgaaagactgtgcctacaattttgctatttagtcattttcccttaccaatttttaggtggggttttttggggagcagggggtaggcagtattgtttgtgcccactggcaggtttagggattcaataaaaactctcataactttgaggggtttttctccccttaacaaagtcaatgttatgagacaacaataaattgaagcataacttcatgactcttaactgctgtttttattaaaatatgaaaaccattgatttttatttgtgtctttagagacattaaaaaaaggaagcccatcaaataggaagcagagcttctgcaccaccagccctgcccttttaagacagtcttagcagatagcccatactggttctgactcgagaccctgcgccagccttgtgagcgagcactggaagaatgtcaagcatgtgccgccatgctcagcatactcagcaatgggtatggcttttcactgaaatggtttcttctgaaggtgattactttttactgtatccaagagcaagaatcatctcagatgaaacagacaattctggaagggttatgcagcagcatattcatacttgttcagaaacaacgccagtatgttagctgtcgtgaataaaaagtacttaggctcagtctgttttccgtgagtctctggaacatgatggaggaactgagaatggggtatctagactcagtttcctgttgatagtaggagtctgaatgtgaccaaagagccattccttactacttttctacttaaacagaacttgtaccataggtttctggtagtgatgttcaaatgacgtcaatgtttaagacactattattagtaattacaaatattcacctactcagaatgtgtaagagcttgtttggcacgtacggcattaatgtgggtcattccttctctcatcttccttcccttgtggttttcccatgtatttattcttttgcctaacagcagaagatggatacaattctcacgtgctacttggatacatgatcccatcagactcccatgagcttgagtgtgggagcttgaaatttagttcctaagtttcccatgattgtcttttttcttttcttcctgaccccttgccattctgcagtttccccttgacttacccaatctgtaacagtgacagtttgctgcttctaaacagagcattcaaatgaattcgcttagccaataacttctgtgaagttgccttttctaatggcgttattactcagtgatgcacagatgtggtatttgccctactggcaggcaagcaaaggtctggcaaagaatgataacctgctatttctttaaggagcgccaaagacttgtgctttactctgttttggttttaggggaaatagtagccattttgattatgaaatctggtagtatttgtaagttgattgtactgtgtaaatgtctaaagttaactgttaaggttagctggccttacaaaatgtaaaagtaatgaaaatttatcagtttctctaaaccagtaaatatcacccttgacaatatttgtttaagcaactcactctccctttgggggcttatcttgatgtactactctcttctgtgcgtctctgtactttcacttgtgcctacaggacaatgtactttcactatggtcaagtcctgggtctgggaattcttcttgaacttgacgcttgtgagaaacagttaacggtagttacttagtacctgttcgacttaagttcagggacatcttatttttactaaatgggattcatttgctattgtttttatgtacaaatgatggtagaatgaaatttcaatatatttttcatttgggcttttaaagaatcaagtaaagagttcaatatgtaaaatctttgtgtaaaaaccatccgtaacgatttattacatcctaatttgttctcaagaggaagtaatgaccttgcaaattaactgcagtattacactattgccctataaaaggttcaagtgtgttaaactcttaattgttaatatatgcttatagtgttgcaaagggatgtcatccctgaagatagagctcagatacagcgtcactgagacaacgggcagtctacactgacaccatttcatctgaaacatatcgatgtctaccttagacagctatggcttttttttttttttttaacagctcagctttttaaaatttcctgctgaaatgactggctgggagtttttggtaaattgtgctaacattctttttaacgttctcaatcagctttcctgagccactcacttcaaagagctggttttgttttgttttgttcaaaagatacaggaaataacatttgagattttaagattctatttctgtaattgctagaggtgttttcacaagtaacagattttaattaattagtaattctagtcacactaataaagaataggaaactgctacccccaggagcaaatgacaccttctaataagtgttctcagtaggtaggtttcaatactacactgaataagtgggtaaagagcccttggaatcccattgtgataaagggacttcccttagcactggaattgttcttagagcctctggatttcagacaaacactgaatttccctgaacttaaccttgagcagaataaccttcattttcacaagaaagtaaggcattgtaacccaaggtggaaaacttaaactttaagacaatactgtgtcagaaaaatgtgtatttagaagagtgaaaccctgtggagtctgttgtcctagtgtatattatattatatagtagataaggtggcttttttttttttattttttattgaagactcattctggttcttcatttggttttgtgttttgtcttttaatgctacatatgtagacagagctcacaagtctttggctcccatattaggttgtacactcagagtcatcttataactggaaactgtcaggtggtcccagctccagtgaacacaggaaaagtcaaggaaaggatgcaagactgggtgaatagcgctctggggttttggttttgttttggtcctccttttaaaaattgtcatttttataatttattggtgtagcctctctctctgttcattggctgacatttcacagtaatatccaaaccaccccataaaattgtattcttacaagcctttaaagctatgattcctgtttagctaagacagtcctgagaggttttggggtttgttttgttttggtttgtttttgcctcactttccccttacccttttttatcctttgtcttcccaactttctggatataaaagaaaaaaaaacttcactggtcttaggcctcagtaatgagtctgactttccaggagtgatacaggaagtgaactaaggtaatgagcaaacttctcacccacctaactgctttccagttgtgaggttcctcttcgtgtgtggtcttttcccttttacccctgaaacccttccctgcctatggtcagttggtctcacggctcacaccagtctcctgagacattctgcactcattatcacctttttgggtggatttttcttagtttttttgttttgtttttaaaaaataactttaacattgattcatatttgcttgggatagagcttatgtaatttaccaatcgtattgattgtatgtgattgtgccctgcagaggtatacttaacatgagtaatcttaagttagtaaaggagctatgagatttgagtcagaatagagatggctttatggggagtgtgaagtcccttctcagaatcagtgctacggaagaccccctttgaaaggttttcctccattcctgtgtttttccattgcctcggctccctattgttttctgacattttctccccacctgctcacaaggttttttaaattgagtcttaaaataagagataacttttaactgaatgaattttgtgaaattttacattttccaaatgttttcaattgaggacaaaggatgggctggacttggccagcctgtgaccatctccttcccatctggcctggccaacagtgagatttgcatttagaggcattatcttctgaaagttgtttttgtataggaaaaaaaagaaccttgcttgaaatggaacattccctttctttaatctgtttaatatttccgtttttaaacagctttcaaaacaaatgaggtggggaaaaaagaactaggagtgtgtttagggctgccgacctctggatctgaacgagtacatggaccatgtgttgcatattcttgagaagattaaggccttctctcttaattttgtattctttgtgtgcatgttgtttatattaaagatggcacattttgttaaaatgctatttcctttattaccttggaaactgactcagcctcttgttgctcctaattagggtttaaggctcttgtaagttgcagataaaaggattcattttaacaatagaaggaggtggttcaccttttggattgtaaatatatgaaagtgtctaaaggtctttatctgctttctgtcagcatttatattaaatgataaattaatgaggagg

SEQ ID NO: 11 - DNA, 3245 bp, Homo sapiens
agcccacagcagtccgtgccgccgtcccgcccgccagcgccccagcgaggaagcagcgcgcagcccgcggcccagcgcacccgcagcagcgcccgcagctcgtccgcgccatgttccaggcggccgagcgcccccaggagtgggccatggagggcccccgcgacgggctgaagaaggagcggctactggacgaccgccacgacagcggcctggactccatgaaagacgaggagtacgagcagatggtcaaggagctgcaggagatccgcctcgagccgcaggaggtgccgcgcggctcggagccctggaagcagcagctcaccgaggacggggactcgtaagtggcggaggcccggggctgggggtcgtcgggagggcgggacgcgcgcggcctgggggtgggaggcgccgggcctggagcccgagccgggggaccagcgatgcagccgggcgggcgccgcggcaccccggggctcctgcaccgccccgaacgctgcagggctgcagggccgcgcggggcaccggcccaactcggaggggcggcggctgggccctggtggatggcagcgtcgccacacgccccctccccccagacccgtcctctaggccgggggcggggcggcagcggggacgcgaagtccccggttgcataaggcggggcgggagtttctggccgctggcgggcgccgagcagccgggaggggaagtacagggcgttccgagctggcgggagggcggggcggtctggccggcgcccgccggggccgcggggggaggggggcggaaagtccctgggcgcctgccaggaacactcagctcataataacctcgcggaaaacaccgcggcctcggcctccagaaaccccggccttgcgcaatcccccgcagcccgcgcctccctgggccccacgcggtgcactcaccacccctggggtttttccctctcttccccacaggttcctgcacttggccatcatccatgaagaaaaggcactgaccatggaagtgatccgccaggtgaagggagacctggccttcctcaacttccagaacaacctgcagcaggtgcgccgcttgcctggcccgggttctctctgaccctgggacgtagctgatgtagcagagtcaccccagatcctttctgaattcagggccactgagcactatttaccctcaccttttacttcacatcagcccacatcctagagagtgaaggaaattccactgatttggtgaggtctttatgacccacctggagcctctgctatttgccagccctccccacccccctgtctaggaggagcagcacccaaccaggagacacgggttgaggggaactcggggtgtgggtttggtccatggcttactttctctggtctctcttgcattcgtagactccactccacttggctgtgatcaccaaccagccagaaattgctgaggcacttctgggagctggctgtgatcctgagctccgagactttcgaggaaatacccccctacaccttgcctgtgagcagggctgcctggccagcgtgggagtcctgactcagtcctgcaccaccccgcacctccactccatcctgaaggctaccaactacaatggtatgtctgcctccctgccctgccccaccccctcggagggcaggtgacgtggagaaggggcaggtgggccaacttaaggagtccaggcaagagcttaaactcctaacatttggaaggttgagaaaatatgtgtgcaaagtgcctattggatgcctttataaagttctttcagaacccagactgtgggttcttaaaattcagaagataagactacttgttccataaaagaataggtgaaaggagtgagggttgaaacaggtggttatacttttttccttttgttcttccaggccacacgtgtctacacttagcctctatccatggctacctgggcatcgtggagcttttggtgtccttgggtgctgatgtcaatgctcaggttggtgcttcctgcccccgacgcactgagtcaggctcctcgtgcttatgttgtgagcagaaattccaaatgcagccataagcatctcaaattccttttggtttcaggagccctgtaatggccggactgcccttcacctcgcagtggacctgcaaaatcctgacctggtgtcactcctgttgaagtgtggggctgatgtcaacagagttacctaccagggctattctccctaccagctcacctggggccgcccaagcacccggatacagcagcagctgggccagctgacactagaaaaccttcagatgctgccagagagtgaggatgaggagagctatgacacagagtcagagttcacggagttcacagaggacgaggtgagtctgtgaactccttcggcgctctaactaatgaggtgccattcccttcaccctcccaggcccctagagctgctccttatcagaggggtatctacataatgagtctctcaaatttctgtgcataaccagtatcccaagaatgtacctgccccccctctttttttaaagagaagcattaaaggcaaactctctcagcctgtaaagttcattatatttgggctatggagaatggagtccaagagttatttccagtagtggcctccccatcccggtagcttggcagagctccgctccggaagcttaacgtgtcttttttccccttgttttcagctgccctatgatgactgtgtgtttggaggccagcgtctgacgttatgagcgcaaaggggctgaaagaacatggacttgtatatttgtacaaaaaaaaagttttatttttctaaaaaaagaaaaaagaagaaaaaatttaaagggtgtacttatatccacactgcacactgcctggcccaaaacgtcttattgtggtaggatcagccctcattttgttgcttttgtgaactttttgtaggggacgagaaagatcattgaaattctgagaaaacttcttttaaacctcacctttgtggggtttttggagaaggttatcaaaaatttcatggaaggaccacattttatatttattgtgcttcgagtgactgaccccagtggtatcctgtgacatgtaacagccaggagtgttaagcgttcagtgatgtggggtgaaaagttactacctgtcaaggtttgtgttaccctcctgtaaatggtgtacataatgtattgttggtaattattttggtacttttatgatgtatatttattaaacagatttttacaaatga

SEQ ID NO: 12 - DNA, 3239 bp, Mus musculus
gagaaatcccctgccagcgtttatagggcgccgcggcggcgctgccgagcccacaacagtcagacctcgccagccagccgccagcagcctgcagcctgcacccgctcagccccgcacagccatgtttcagccagctgggcacggccaggactgggccatggagggcccgcgggatggcctcaagaaggagcgcttggtggacgatcgccacgacagcggcctggactccatgaaggacgaggagtacgagcaaatggtgaaggagctgcgggagatccgcctgcagccgcaggaggcgccgctggccgccgagccctggaagcagcagctcacggaggacggagactcgtaagtggcgccgggcaccggtgggggtcgcgcggggcctgcagcgcgctcggggttctgcacggcgagggcgccggggttgcggggcgccggggctgcggcgggccgcctgtcttcccccctccccctcctcccctgtccccggacccggagtcgccgagcgcaggccggggggggcggggcggcagcggcggcgaggacgcaaagtcccggcctggcagcggtggcgcgcagccgccgggcgccgcgcggccgcgaggggaagtacagggcgttccgggcggcggagggcgggccggtctggccggcgcccgcccggagggggtggggcacggaaagtccctgggcggctgccaggaacactcagctcataataacctcgcggaaaacaccgcggccgcggcctccagaaaccccggccttgcgcaatcccccctccaaccccacctccagcccgcgcctcccccccccccacgcagtgtgctcaccacccctcggggggtttccctgtcatccctcaggttcctgcacttggcaatcatccacgaagagaagccgctgaccatggaagtcattggtcaggtgaagggagacctggccttcctcaacttccagaacaacctgcagcaggtgcgctgcttgcttgccccgcgggtgccctctttgaccccttggtggagtcagatgtagcacggtcgcccccaaagcgtttctaaattaatagtcacttagttcttatctgccttggccttttgcattcaaatcagccaacgtcttagaaccagaagaaaaatcccttgggtttagtgaggtctttatgacccacctagggcctcctgtttgcctgatctcctaagagacaaatgggaggatcagattccatagcgggaggtgtctggggttcaggaaactcaagactatgggtttgctccatggcttatccctttctgtttcctcttccatttgtagactccactccacttggctgtgatcaccaaccagccaggaattgctgaggcacttctgaaagctggctgtgatcctgagctccgagactttcgaggaaatacccctctacatcttgcctgtgagcagggctgcctggccagtgtagcagtcttgacgcagacctgcacaccccagcatctccactccgtcctgcaggccaccaactacaatggtaggtctgccagtccatccaaggatgcagaggagggagagagatggggccacttgagtcttaaactccgaacgtatacaaagttcagacactgtgatctttttaaaaagttttctcctcgatgcctatatgatattcactcagaacccagattctgagttcttcaaaactgatgatgtttgtggttgtcctcaagacaatagacatgagttgtgtgaggattgaaacacgtagttacagtttttgtcttcctcctccaggccacacgtgtctgcacctagcctctatccacggctacctggccatcgtggagcacttggtgactttgggtgctgatgtcaacgctcaggtgagtacatctcccttccacctaatctctgttgggctggctctgatggtgagcaggtttccagatgcagccgtaaactaacgcctgattgcttttggtttcaggagccctgcaatggccggacagccctccaccttgcggtggacctgcagaatcctgacctggtttcgctcttgttgaaatgtggggctgatgtcaacagggtaacctaccaaggctactccccctaccagcttacctggggccgcccaagtacccggatacagcagcagctgggccagctgaccctggaaaatctccagatgctacccgagagcgaggatgaggagagctatgacacggagtcagaattcacagaggatgaggtgagtgttcctcccctcagcacgctgacggctgttctagggctgctttggatcagagggatttcagttgtttaacttctcagactcggcttgcaaagccaggatcccaagaatttgtctctggtttgttttaagagcttacccttttgggttgaggaatgagggaattctagaaattgaacccaggccttagcacatggtgataagcacacgttcaaccattaagctccaccccctcaatagcttagactttttttttttttaaggaaagaataggtaagggaaactcctacagcctggtgcccttgttctatttgggttaaggagaaaaagagcccaagaataggagttatttcagcagcagctctccccttatcccaatgtcttggtgaagttctaggaatttaatatgtctttttcccctctcttgttttagctgccctatgatgactgtgtgtttggaggccagcgtctgacattataagtggaaagtggcaaaaagaatgtggacttgtatatttgtacaaatagagttttatttttctaaaaaaaaaaaaaaaaagaaaaagaaaaaaaatgagaaagggtatacttagcaccacaccacacagcgcctagacccaggcattttactggggtgattcggctgttgtctttgtgaaatccggggaaacagatcactgaaattcaaagaaaatgtctcttaaggttcatgtttgtgggattttttttgggggggggggaggtgattttccagaacctaatgaaaggaccacgttttatttattgtgcttttgattgaaccaccatagacctagtaagtgagcccagtgtgtcctcccatgtaagagccaggtgttcagtggcatgtgcttaaaagtcgcccccaactaaggtctgtgtcgccttcttgtaaatgttgtatatgttgtattttgttggtaattattttggtacttctaagatgtatatttattaaacagatttttacagacag

SEQ ID NO: 13 - RNA, 23 nt, Homo sapiens
cgcacuuccgcacauuccguucg

SEQ ID NO: 14 - RNA, 23 nt, Homo sapiens
ggggagggucucuggcuuuauuu

SEQ ID NO: 15 - RNA, 23 nt, Homo sapiens
cagcauuaacugggaugccgugu

SEQ ID NO: 16 - RNA, 23 nt, Homo sapiens
ccaggaccugaacucgcaccucc

SEQ ID NO: 17 - RNA, 23 nt, Homo sapiens
uacauauacccaguaucuuugca

SEQ ID NO: 18 - RNA, 23 nt, Homo sapiens
gccgacaaugcagucuccacagc

SEQ ID NO: 19 - RNA, 23 nt, Homo sapiens
ccccugguuguuguagcagcuua

SEQ ID NO: 20 - RNA, 23 nt, Homo sapiens
cugcugugcagaauccuauuuua

SEQ ID NO: 21 - RNA, 23 nt, Homo sapiens
ugggaugccguguuauuuuguua

SEQ ID NO: 22 - RNA, 23 nt, Homo sapiens
ucgcaccuccuaccucuucaugu

SEQ ID NO: 23 - DNA, 19 bp, Homo sapiens
cacgcacttccgcacattc

SEQ ID NO: 24 - DNA, 19 bp, Homo sapiens
ttccgttcgcacgccgatt

SEQ ID NO: 25 - DNA, 19 bp, Homo sapiens
gagcttcgactgcctcttc

SEQ ID NO: 26 - DNA, 23 bp, Homo sapiens
cgcacttccgcacattccgttcg

SEQ ID NO: 27 - DNA, 23 bp, Homo sapiens
ggggagggtctctggctttattt

SEQ ID NO: 28 - DNA, 23 bp, Homo sapiens
cagcattaactgggatgccgtgt

SEQ ID NO: 29 - DNA, 23 bp, Homo sapiens
ccaggacctgaactcgcacctcc

SEQ ID NO: 30 - DNA, 23 bp, Homo sapiens
tacatatacccagtatctttgca

SEQ ID NO: 31 - DNA, 23 bp, Homo sapiens
gccgacaatgcagtctccacagc

SEQ ID NO: 32 - DNA, 23 bp, Homo sapiens
cccctggttgttgtagcagctta

SEQ ID NO: 33 - DNA, 23 bp, Homo sapiens
ctgctgtgcagaatcctatttta

SEQ ID NO: 34 - DNA, 23 bp, Homo sapiens
tgggatgccgtgttattttgtta

SEQ ID NO: 35 - DNA, 23 bp, Homo sapiens
tcgcacctcctacctcttcatgt

SEQ ID NO: 36 - DNA, 21 bp, Homo sapiens
tttcgagctgctggagcacta

SEQ ID NO: 37 - DNA, 21 bp, Homo sapiens
tcgagctgctggagcactacg

SEQ ID NO: 38 - DNA, 21 bp, Homo sapiens
tcgccaacggaactgcttctt

SEQ ID NO: 39 - DNA, 21 bp, Homo sapiens
acttctggctggagacctcat

SEQ ID NO: 40 - DNA, 21 bp, Homo sapiens
gcgagaccttcgactgccttt

SEQ ID NO: 41 - DNA, 21 bp, Homo sapiens
cgacactcacttccgcacctt

SEQ ID NO: 42 - DNA, 21 bp, Homo sapiens
ctacctgagttccttcccctt

SEQ ID NO: 43 - DNA, 21 bp, Homo sapiens
ttccgctcccactccgattac

SEQ ID NO: 44 - DNA, 21 bp, Homo sapiens
taacccggtactccgtgacta

SEQ ID NO: 45 - DNA, 21 bp, Homo sapiens
tactccgtgactacctgagtt

SEQ ID NO: 46 - DNA, 21 bp, Homo sapiens
cttccgctcccactccgatta

SEQ ID NO: 47 - DNA, 21 bp, Homo sapiens
gcgcgacagtcgccaacggaa

SEQ ID NO: 48 - DNA, 21 bp, Homo sapiens
tggacgcctgcggcttctatt

SEQ ID NO: 49 - DNA, 21 bp, Homo sapiens
cgcatccctcttaacccggta

SEQ ID NO: 50 - DNA, 21 bp, Homo sapiens
tacatattcccagtatctttg

SEQ ID NO: 51 - DNA, 21 bp, Homo sapiens
gcgccttattatttcttatta

SEQ ID NO: 52 - DNA, 21 bp, Homo sapiens
ccgtgactacctgagttcctt

SEQ ID NO: 53 - DNA, 21 bp, Homo sapiens
ggagggtctctggcttcattt

SEQ ID NO: 54 - DNA, 21 bp, Homo sapiens
ttcgcgctcagcgtgaagatg

SEQ ID NO: 55 - DNA, 21 bp, Homo sapiens
atccctcttaacccggtactc

SEQ ID NO: 56 - DNA, 20 bp, Homo sapiens
gcggctgcgcgccgagcccg

SEQ ID NO: 57 - DNA, 20 bp, Homo sapiens
ggacgcctgcggattctact

SEQ ID NO: 58 - DNA, 20 bp, Homo sapiens
ggctgccatccaggtgaaag

SEQ ID NO: 59 - DNA, 20 bp, Homo sapiens
gcggctgtcgcgcaccagga

SEQ ID NO: 60 - DNA, 20 bp, Homo sapiens
tggacgcctgcggattctac

SEQ ID NO: 61 - DNA, 20 bp, Homo sapiens
gacgcctgcggattctactg

SEQ ID NO: 62 - DNA, 20 bp, Homo sapiens
agtgctccagcagctcgaag

SEQ ID NO: 63 - DNA, 20 bp, Homo sapiens
gccggccgctttcacctgga

SEQ ID NO: 64 - DNA, 20 bp, Homo sapiens
agtagaatccgcaggcgtcc

SEQ ID NO: 65 - DNA, 20 bp, Homo sapiens
cgcaccaggaaggtgcccac

SEQ ID NO: 66 - DNA, 20 bp, Homo sapiens
ggccggcctgaaagtgcacg

SEQ ID NO: 67 - DNA, 20 bp, Homo sapiens
tccgttcgcacgccgattac

SEQ ID NO: 68 - DNA, 20 bp, Homo sapiens
agcgcgctcctggacgcctg

SEQ ID NO: 69 - DNA, 20 bp, Homo sapiens
cggctgcgcgccgagcccgt

SEQ ID NO: 70 - DNA, 20 bp, Homo sapiens
acgcctgcggattctactgg

SEQ ID NO: 71 - DNA, 20 bp, Homo sapiens
cgaggccatcttcacgctaa

SEQ ID NO: 72 - DNA, 20 bp, Homo sapiens
tcaggccggccgctttcacc

SEQ ID NO: 73 - DNA, 20 bp, Homo sapiens
cttagcgtgaagatggcctc

SEQ ID NO: 74 - DNA, 20 bp, Homo sapiens
gccggtaatcggcgtgcgaa

SEQ ID NO: 75 - DNA, 20 bp, Homo sapiens
ctgcattgtcggctgccacc

SEQ ID NO: 76 - DNA, 20 bp, Homo sapiens
gtgcgccccgtgcacgctca

SEQ ID NO: 77 - DNA, 20 bp, Homo sapiens
gctgtgccgccagcgcatcg

SEQ ID NO: 78 - DNA, 20 bp, Homo sapiens
cacgcggcgctggcgcagcg

SEQ ID NO: 79 - DNA, 20 bp, Homo sapiens
gctcctgcagcggccgcacg

SEQ ID NO: 80 - DNA, 20 bp, Homo sapiens
agctctcgcggctgccatcc

SEQ ID NO: 81 - DNA, 20 bp, Homo sapiens
tggtgcgcgacagccgccag

SEQ ID NO: 82 - DNA, 20 bp, Homo sapiens
gatggtagcacacaaccagg

SEQ ID NO: 83 - DNA, 20 bp, Homo sapiens
agaggcagtcgaagctctcg

SEQ ID NO: 84 - DNA, 20 bp, Homo sapiens
gctggcggctgtcgcgcacc

SEQ ID NO: 85 - DNA, 20 bp, Homo sapiens
ccgaggccatcttcacgcta

SEQ ID NO: 86 - DNA, 20 bp, Homo sapiens
ggggcccccagcatgcggcg

SEQ ID NO: 87 - DNA, 20 bp, Homo sapiens
gctgctggagcactacgtgg

SEQ ID NO: 88 - DNA, 20 bp, Homo sapiens
cgagctgctggagcactacg

SEQ ID NO: 89 - DNA, 20 bp, Homo sapiens
cgaaaaagcagttccgctgg

SEQ ID NO: 90 - DNA, 20 bp, Homo sapiens
gcaggcgtccaggagcgcgc

SEQ ID NO: 91 - DNA, 20 bp, Homo sapiens
ggggcccctgagcgtgcacg

SEQ ID NO: 92 - DNA, 20 bp, Homo sapiens
gcggcgccgcgccgcatgct

SEQ ID NO: 93 - DNA, 20 bp, Homo sapiens
gcacgcggcgctggcgcagc

SEQ ID NO: 94 - DNA, 20 bp, Homo sapiens
tgggggcccctgagcgtgca

SEQ ID NO: 95 - DNA, 20 bp, Homo sapiens
caggaaggtgcccacgggct

SEQ ID NO: 96 - DNA, 20 bp, Homo sapiens
tgcgccccgtgcacgctcag

SEQ ID NO: 97 - DNA, 20 bp, Homo sapiens
gccatccaggtgaaagcggc

SEQ ID NO: 98 - DNA, 20 bp, Homo sapiens
cacgcgcgccagcgcgctcc

SEQ ID NO: 99 - DNA, 20 bp, Homo sapiens
gggcccccagtagaatccgc

SEQ ID NO: 100 - DNA, 20 bp, Homo sapiens
atccgcgtgcactttcaggc

SEQ ID NO: 101 - DNA, 20 bp, Homo sapiens
cgagcccgtgggcaccttcc

SEQ ID NO: 102 - DNA, 20 bp, Homo sapiens
ccacagcagcagagccccga

SEQ ID NO: 103 - DNA, 20 bp, Homo sapiens
agccaggttctcgcggccca

SEQ ID NO: 104 - DNA, 20 bp, Homo sapiens
aaagtgcacgcggatgctcg

SEQ ID NO: 105 - DNA, 20 bp, Homo sapiens
ctcttcctcctcctcgcccg

SEQ ID NO: 106 - DNA, 20 bp, Homo sapiens
gcgtgcacggggcgcacgag

SEQ ID NO: 107 - DNA, 20 bp, Homo sapiens
aagtgcacgcggatgctcgt

SEQ ID NO: 108 - DNA, 20 bp, Homo sapiens
cgtgcgccccgtgcacgctc

SEQ ID NO: 109 - DNA, 20 bp, Homo sapiens
gcagcggccgcacgcggcgc

SEQ ID NO: 110 - DNA, 20 bp, Homo sapiens
ccttagcgtgaagatggcct

SEQ ID NO: 111 - DNA, 20 bp, Homo sapiens
caggttctcgcggcccacgg

SEQ ID NO: 112 - DNA, 20 bp, Homo sapiens
gcgcaccaggaaggtgccca

SEQ ID NO: 113 - DNA, 20 bp, Homo sapiens
gctgccggtcaaatctggaa

SEQ ID NO: 114 - DNA, 20 bp, Homo sapiens
cggcgtgcgaacggaatgtg

SEQ ID NO: 115 - DNA, 20 bp, Homo sapiens
cagcagcagagccccgacgg

SEQ ID NO: 116 - DNA, 20 bp, Homo sapiens
gggcgaaaaagcagttccgc

SEQ ID NO: 117 - DNA, 20 bp, Homo sapiens
cgcacgcggcgctggcgcag

SEQ ID NO: 118 - DNA, 20 bp, Homo sapiens
ggatgcgagccaggttctcg

SEQ ID NO: 119 - DNA, 20 bp, Homo sapiens
tggcggcacagctcctgcag

SEQ ID NO: 120 - DNA, 20 bp, Homo sapiens
gcgcccgcggccgtgccccg

SEQ ID NO: 121 - DNA, 20 bp, Homo sapiens
ggcgccgcgccgcatgctgg

SEQ ID NO: 122 - DNA, 20 bp, Homo sapiens
cggtggccacgatgcgctgg

SEQ ID NO: 123 - DNA, 20 bp, Homo sapiens
tgctgtggagactgcattgt

SEQ ID NO: 124 - DNA, 20 bp, Homo sapiens
taggatggtagcacacaacc

SEQ ID NO: 125 - DNA, 20 bp, Homo sapiens
gcggccgtgccccgcggtcc

SEQ ID NO: 126 - DNA, 20 bp, Homo sapiens
gagcatccgcgtgcactttc

SEQ ID NO: 127 - DNA, 20 bp, Homo sapiens
cgctgccggtcaaatctgga

SEQ ID NO: 128 - DNA, 20 bp, Homo sapiens
cagcgcatcgtggccaccgt

SEQ ID NO: 129 - DNA, 20 bp, Homo sapiens
gcggatgctcgtgggtcccg

SEQ ID NO: 130 - DNA, 20 bp, Homo sapiens
cggcgccgcgccgcatgctg

SEQ ID NO: 131 - DNA, 20 bp, Homo sapiens
cggtcaaatctggaagggga

SEQ ID NO: 132 - DNA, 20 bp, Homo sapiens
aggaaggttctggccgccgt

SEQ ID NO: 133 - DNA, 20 bp, Homo sapiens
ccacggtggccacgatgcgc

SEQ ID NO: 134 - DNA, 20 bp, Homo sapiens
cgctgcgccagcgccgcgtg

SEQ ID NO: 135 - DNA, 20 bp, Homo sapiens
aggagctcaggtagtcgcgg

SEQ ID NO: 136 - DNA, 20 bp, Homo sapiens
gcagcggggcccccagcatg

SEQ ID NO: 137 - DNA, 20 bp, Homo sapiens
ggaaggagctcaggtagtcg

SEQ ID NO: 138 - DNA, 20 bp, Homo sapiens
tcgcggaggacggggttgag

SEQ ID NO: 139 - DNA, 20 bp, Homo sapiens
cgactgcctcttcgagctgc

SEQ ID NO: 140 - DNA, 20 bp, Homo sapiens
gcgccgcgtgcggccgctgc

SEQ ID NO: 141 - DNA, 20 bp, Homo sapiens
caccgtgggccgcgagaacc

SEQ ID NO: 142 - DNA, 20 bp, Homo sapiens
gtgccccgcggtcccggccc

SEQ ID NO: 143 - DNA, 20 bp, Homo sapiens
ctgccggtcaaatctggaag

SEQ ID NO: 144 - DNA, 20 bp, Homo sapiens
cttccccttccagatttgac

SEQ ID NO: 145 - DNA, 20 bp, Homo sapiens
ctcaggtagtcgcggaggac

SEQ ID NO: 146 - DNA, 20 bp, Homo sapiens
cgggcgctgccggtcaaatc

SEQ ID NO: 147 - DNA, 20 bp, Homo sapiens
ggaaggttctggccgccgtc

SEQ ID NO: 148 - DNA, 20 bp, Homo sapiens
gctcaggtagtcgcggagga

SEQ ID NO: 149 - DNA, 20 bp, Homo sapiens
gcggaagtgcgtgtcgccgg

SEQ ID NO: 150 - DNA, 20 bp, Homo sapiens
ggaccgcggggcacggccgc

SEQ ID NO: 151 - DNA, 20 bp, Homo sapiens
gggaccgcggggcacggccg

SEQ ID NO: 152 - DNA, 20 bp, Homo sapiens
gcgcgtgatgcgccggtaat

SEQ ID NO: 153 - DNA, 20 bp, Homo sapiens
tcaggtagtcgcggaggacg

SEQ ID NO: 154 - DNA, 20 bp, Homo sapiens
tgcggaagtgcgtgtcgccg

SEQ ID NO: 155 - DNA, 20 bp, Homo sapiens
ggggccgggaccgcggggca

SEQ ID NO: 156 - DNA, 20 bp, Homo sapiens
ccgtcggggctctgctgctg

SEQ ID NO: 157 - DNA, 20 bp, Homo sapiens
gaaggttctggccgccgtcg

SEQ ID NO: 158 - DNA, 20 bp, Homo sapiens
gtgtgctaccatcctacaga

SEQ ID NO: 159 - DNA, 20 bp, Homo sapiens
gtcgcggaggacggggttga

SEQ ID NO: 160 - DNA, 20 bp, Homo sapiens
cgctggcgcgcgtgatgcgc

SEQ ID NO: 161 - DNA, 20 bp, Homo sapiens
gcgtgcacggcgggcgctgc

SEQ ID NO: 162 - DNA, 20 bp, Homo sapiens
tctggaaggggaaggagctc

SEQ ID NO: 163 - DNA, 20 bp, Homo sapiens
gtgcgtgtcgccgggggccg

SEQ ID NO: 164 - DNA, 20 bp, Homo sapiens
gggcacggccgcgggcgcgc

SEQ ID NO: 165 - DNA, 20 bp, Homo sapiens
gttaatgctgcgtgcacggc

SEQ ID NO: 166 - DNA, 20 bp, Homo sapiens
gcacggccgcgggcgcgcgg

SEQ ID NO: 167 - DNA, 20 bp, Homo sapiens
ggggcacggccgcgggcgcg

SEQ ID NO: 168 - DNA, 20 bp, Homo sapiens
gtgcggaagtgcgtgtcgcc

SEQ ID NO: 169 - DNA, 20 bp, Homo sapiens
gaggaagaggaggaaggttc

SEQ ID NO: 170 - DNA, 20 bp, Homo sapiens
ggctggccccttctgtagga

SEQ ID NO: 171 - DNA, 20 bp, Homo sapiens
ggggccggggccgggaccgc

SEQ ID NO: 172 - DNA, 20 bp, Homo sapiens
cgcggaggacggggttgagg

SEQ ID NO: 173 - DNA, 20 bp, Homo sapiens
tttcgcccttagcgtgaaga

SEQ ID NO: 174 - DNA, 20 bp, Homo sapiens
ggcacggccgcgggcgcgcg

SEQ ID NO: 175 - DNA, 20 bp, Homo sapiens
agtcgcggaggacggggttg

SEQ ID NO: 176 - DNA, 20 bp, Homo sapiens
gggccggggccgggaccgcg

SEQ ID NO: 177 - DNA, 20 bp, Homo sapiens
aagtgcgtgtcgccgggggc

SEQ ID NO: 178 - DNA, 20 bp, Homo sapiens
ctccggctggccccttctgt

SEQ ID NO: 179 - DNA, 20 bp, Homo sapiens
ggcggcgccgcgccgcatgc

SEQ ID NO: 180 - DNA, 20 bp, Homo sapiens
agtgcgtgtcgccgggggcc

SEQ ID NO: 181 - DNA, 20 bp, Homo sapiens
tgtgcggaagtgcgtgtcgc

SEQ ID NO: 182 - DNA, 20 bp, Homo sapiens
gtgtcgccgggggccggggc

SEQ ID NO: 183 - DNA, 20 bp, Homo sapiens
tgtcgccgggggccggggcc

SEQ ID NO: 184 - DNA, 20 bp, Homo sapiens
gcggtcccggccccggcccc

SEQ ID NO: 185 - DNA, 20 bp, Homo sapiens
cgcgggggccgcgggcgagg

SEQ ID NO: 186 - DNA, 20 bp, Homo sapiens
cgcgggcgaggaggaggaag

SEQ ID NO: 187 - DNA, 20 bp, Homo sapiens
gggcgaggaggaggaagagg

SEQ ID NO: 188 - DNA, 20 bp, Mus musculus
gaagtgcacgcggatgctcg

SEQ ID NO: 189 - DNA, 20 bp, Mus musculus
agtgctccagcagctcgaaa

SEQ ID NO: 190 - DNA, 20 bp, Mus musculus
gccggccgcttccacttgga

SEQ ID NO: 191 - DNA, 20 bp, Mus musculus
gctgtgtcgccagcgcatcg

SEQ ID NO: 192 - DNA, 20 bp, Mus musculus
gcgactgtcgcgcaccaaga

SEQ ID NO: 193 - DNA, 20 bp, Mus musculus
gcgtgcacggggcgcacgag

SEQ ID NO: 194 - DNA, 20 bp, Mus musculus
tcacggagtaccgggttaag

SEQ ID NO: 195 - DNA, 20 bp, Mus musculus
ggacgcctgcggcttctatt

SEQ ID NO: 196 - DNA, 20 bp, Mus musculus
gcgcgaagaagcagttccgt

SEQ ID NO: 197 - DNA, 20 bp, Mus musculus
gctcagcgtgaagatggctt

SEQ ID NO: 198 - DNA, 20 bp, Mus musculus
cgagcccgtgggcaccttct

SEQ ID NO: 199 - DNA, 20 bp, Mus musculus
atccgcgtgcacttccaggc

SEQ ID NO: 200 - DNA, 20 bp, Mus musculus
cgccaggttctcgcgaccca

SEQ ID NO: 201 - DNA, 20 bp, Homo sapiens
ccatgcccaccaccatcgag

SEQ ID NO: 202 - DNA, 20 bp, Homo sapiens
tctacggaaacgtattcgag

SEQ ID NO: 203 - DNA, 20 bp, Homo sapiens
tttagtatattgagaacttg

SEQ ID NO: 204 - DNA, 20 bp, Homo sapiens
gcactacagtggatcaccgc

SEQ ID NO: 205 - DNA, 20 bp, Homo sapiens
tgtcatgctgaaccgcattg

SEQ ID NO: 206 - DNA, 20 bp, Homo sapiens
ggaaacttggccactctatg

SEQ ID NO: 207 - DNA, 20 bp, Homo sapiens
gtatttgaaattattaatgc

SEQ ID NO: 208 - DNA, 20 bp, Homo sapiens
cagtttagttgacatagaag

SEQ ID NO: 209 - DNA, 20 bp, Homo sapiens
gggtctgaataagacccatt

SEQ ID NO: 210 - DNA, 20 bp, Homo sapiens
ccatgactatcctcatagag

SEQ ID NO: 211 - DNA, 20 bp, Homo sapiens
ccatgactatcctcatagag

SEQ ID NO: 212 - DNA, 20 bp, Homo sapiens
ctcttcgaactcccgctcga

SEQ ID NO: 213 - DNA, 20 bp, Homo sapiens
gaaccctgaccatgggcctg

SEQ ID NO: 214 - DNA, 20 bp, Homo sapiens
gctccttgaaccctgaccat

SEQ ID NO: 215 - DNA, 20 bp, Homo sapiens
agttggatactcagcgtcgc

SEQ ID NO: 216 - DNA, 20 bp, Homo sapiens
ccgctcgatggtggtgggca

SEQ ID NO: 217 - DNA, 20 bp, Homo sapiens
cagaaatggcagcatgtgtt

SEQ ID NO: 218 - DNA, 20 bp, Homo sapiens
gcactacagtggatcaccgc

SEQ ID NO: 219 - DNA, 20 bp, Homo sapiens
ggtagacacttgtcttgttt

SEQ ID NO: 220 - DNA, 20 bp, Homo sapiens
tggcagcatgtgttaggaag

SEQ ID NO: 221 - DNA, 20 bp, Homo sapiens
aggcccatggtcagggttca

SEQ ID NO: 222 - DNA, 20 bp, Homo sapiens
gttcagcatgacaactgctt

SEQ ID NO: 223 - DNA, 20 bp, Homo sapiens
caatggaggagaacagtgag

SEQ ID NO: 224 - DNA, 20 bp, Homo sapiens
ctcttctatgtcaactaaac

SEQ ID NO: 225 - DNA, 20 bp, Homo sapiens
agtggatcaccgcaggccca

SEQ ID NO: 226 - DNA, 20 bp, Homo sapiens
ctgacaggtgaccgatgtac

SEQ ID NO: 227 - DNA, 20 bp, Homo sapiens
aactcccgctcgatggtggt

SEQ ID NO: 228 - DNA, 20 bp, Homo sapiens
gtctccctgatccatccagt

SEQ ID NO: 229 - DNA, 20 bp, Homo sapiens
tagaggaaagtcctgtacat

SEQ ID NO: 230 - DNA, 20 bp, Homo sapiens
atgtatggaaaggatggtaa

SEQ ID NO: 231 - DNA, 20 bp, Homo sapiens
gcccaatgcctgcactacag

SEQ ID NO: 232 - DNA, 20 bp, Homo sapiens
cgagcgggagttcgaagagt

SEQ ID NO: 233 - DNA, 20 bp, Homo sapiens
tcaccgcaggcccatggtca

SEQ ID NO: 234 - DNA, 20 bp, Homo sapiens
cagtttagttgacatagaag

SEQ ID NO: 235 - DNA, 20 bp, Homo sapiens
ccatgcccaccaccatcgag

SEQ ID NO: 236 - DNA, 20 bp, Homo sapiens
gccaaaccataagccagaaa

SEQ ID NO: 237 - DNA, 20 bp, Homo sapiens
ccgattctttctccacaatg

SEQ ID NO: 238 - DNA, 20 bp, Homo sapiens
ttcgaactcccgctcgatgg

SEQ ID NO: 239 - DNA, 20 bp, Homo sapiens
agtgcaggcattgggcgctc

SEQ ID NO: 240 - DNA, 20 bp, Homo sapiens
ggaaacttggccactctatg

SEQ ID NO: 241 - DNA, 20 bp, Homo sapiens
atccactgtagtgcaggcat

SEQ ID NO: 242 - DNA, 20 bp, Homo sapiens
cactctatgaggatagtcat

SEQ ID NO: 243 - DNA, 20 bp, Homo sapiens
ccactctatgaggatagtca

SEQ ID NO: 244 - DNA, 20 bp, Homo sapiens
tccactgtagtgcaggcatt

SEQ ID NO: 245 - DNA, 20 bp, Homo sapiens
aagttctttccatcgtttct

SEQ ID NO: 246 - DNA, 20 bp, Homo sapiens
tcgctggcagccgctgtact

SEQ ID NO: 247 - DNA, 20 bp, Homo sapiens
gaactcccgctcgatggtgg

SEQ ID NO: 248 - DNA, 20 bp, Homo sapiens
aggatggtaaaggcaccaac

SEQ ID NO: 249 - DNA, 20 bp, Homo sapiens
aaagggagattctagtatac

SEQ ID NO: 250 - DNA, 20 bp, Homo sapiens
agaatttaggatgtatggaa

SEQ ID NO: 251 - DNA, 20 bp, Homo sapiens
gggtctgaataagacccatt

SEQ ID NO: 252 - DNA, 20 bp, Homo sapiens
ggcaccaactggatggatca

SEQ ID NO: 253 - DNA, 20 bp, Homo sapiens
ctctaaaatgcaagatacaa

SEQ ID NO: 254 - DNA, 20 bp, Homo sapiens
gtatttgaaattattaatgc

SEQ ID NO: 255 - DNA, 20 bp, Homo sapiens
cctttcttgcagatggaaaa

SEQ ID NO: 256 - DNA, 20 bp, Homo sapiens
ctgcaccttctgagctgtgg

SEQ ID NO: 257 - DNA, 20 bp, Homo sapiens
atgctgccatttctggctta

SEQ ID NO: 258 - DNA, 20 bp, Homo sapiens
tttctttaaacagcatctct

SEQ ID NO: 259 - DNA, 20 bp, Homo sapiens
agacatggaatgcagaatgc

SEQ ID NO: 260 - DNA, 20 bp, Homo sapiens
aggcaccaactggatggatc

SEQ ID NO: 261 - DNA, 20 bp, Homo sapiens
taatgactgaaaaatacaat

SEQ ID NO: 262 - DNA, 20 bp, Homo sapiens
gaatgcagaatgcaggaaat

SEQ ID NO: 263 - DNA, 20 bp, Homo sapiens
tttaggatgtatggaaagga

SEQ ID NO: 264 - DNA, 20 bp, Homo sapiens
ctaacacatgctgccatttc

SEQ ID NO: 265 - DNA, 20 bp, Homo sapiens
tcatacatggctataataga

SEQ ID NO: 266 - DNA, 20 bp, Homo sapiens
acgatggaaagaactttcta

SEQ ID NO: 267 - DNA, 20 bp, Homo sapiens
acgtattcgagaggacagaa

SEQ ID NO: 268 - DNA, 20 bp, Homo sapiens
gcggtgatccactgtagtgc

SEQ ID NO: 269 - DNA, 20 bp, Homo sapiens
tattaatgctggatgttaaa

SEQ ID NO: 270 - DNA, 20 bp, Homo sapiens
gagatgctgtttaaagaaac

SEQ ID NO: 271 - DNA, 20 bp, Homo sapiens
cagcaagaatttaggatgta

SEQ ID NO: 272 - DNA, 20 bp, Homo sapiens
ttgacatagaagaggcacaa

SEQ ID NO: 273 - DNA, 20 bp, Homo sapiens
gattcagggactccaaaatc

SEQ ID NO: 274 - DNA, 20 bp, Homo sapiens
ctcactttcattatactacc

SEQ ID NO: 275 - DNA, 20 bp, Homo sapiens
tttagtatattgagaacttg

SEQ ID NO: 276 - DNA, 20 bp, Homo sapiens
agggactccaaaatctggcc

SEQ ID NO: 277 - DNA, 20 bp, Homo sapiens
aggttaaatgtgcacagtac

SEQ ID NO: 278 - DNA, 20 bp, Homo sapiens
atcaccgcaggcccatggtc

SEQ ID NO: 279 - DNA, 20 bp, Homo sapiens
agcatctcttggtcatctgt

SEQ ID NO: 280 - DNA, 20 bp, Homo sapiens
gaaggagcaaaatgtataaa

SEQ ID NO: 281 - DNA, 20 bp, Homo sapiens
gccatttctggcttatggtt

SEQ ID NO: 282 - DNA, 20 bp, Homo sapiens
ctggatggatcagggagaca

SEQ ID NO: 283 - DNA, 20 bp, Homo sapiens
aaatacaatgggaacagaat

SEQ ID NO: 284 - DNA, 20 bp, Homo sapiens
ataatgactgaaaaatacaa

SEQ ID NO: 285 - DNA, 20 bp, Homo sapiens
catgcccaccaccatcgagc

SEQ ID NO: 286 - DNA, 20 bp, Homo sapiens
aacatgagaaaataccgaat

SEQ ID NO: 287 - DNA, 20 bp, Homo sapiens
agaaatgaagctggtgattc

SEQ ID NO: 288 - DNA, 20 bp, Homo sapiens
ccgcattgtggagaaagaat

SEQ ID NO: 289 - DNA, 20 bp, Homo sapiens
gaaatgaagctggtgattca

SEQ ID NO: 290 - DNA, 20 bp, Homo sapiens
ttgtttaaagtgagagaatc

SEQ ID NO: 291 - DNA, 20 bp, Homo sapiens
ccgcgactcaccaagtacag

SEQ ID NO: 292 - DNA, 20 bp, Homo sapiens
gaacatgagaaaataccgaa

SEQ ID NO: 293 - DNA, 20 bp, Homo sapiens
tatactacctggccagattt

SEQ ID NO: 294 - DNA, 20 bp, Homo sapiens
tatgagaatctcagttgatc

SEQ ID NO: 295 - DNA, 20 bp, Homo sapiens
tcaactgagattctcataca

SEQ ID NO: 296 - DNA, 20 bp, Homo sapiens
tgagaatctcagttgatctg

SEQ ID NO: 297 - DNA, 20 bp, Homo sapiens
atgagaatctcagttgatct

SEQ ID NO: 298 - DNA, 20 bp, Homo sapiens
tggtaaaggcaccaactgga

SEQ ID NO: 299 - DNA, 20 bp, Homo sapiens
tgtcatgctgaaccgcattg

SEQ ID NO: 300 - DNA, 20 bp, Homo sapiens
tttggtgaatgatcaaaggc

SEQ ID NO: 301 - DNA, 20 bp, Homo sapiens
atgaaagtgagatattgttc

SEQ ID NO: 302 - DNA, 20 bp, Homo sapiens
tatttcctcatagtgctcta

SEQ ID NO: 303 - DNA, 20 bp, Homo sapiens
agaaggagcaaaatgtataa

SEQ ID NO: 304 - DNA, 20 bp, Homo sapiens
tttgtttggtgaatgatcaa

SEQ ID NO: 305 - DNA, 20 bp, Homo sapiens
tctacggaaacgtattcgag

SEQ ID NO: 306 - DNA, 20 bp, Homo sapiens
aaaggccaccacagctcaga

SEQ ID NO: 307 - DNA, 20 bp, Homo sapiens
aggtgcagcagatgaaacag

SEQ ID NO: 308 - DNA, 20 bp, Homo sapiens
ggctccttgaaccctgacca

SEQ ID NO: 309 - DNA, 20 bp, Homo sapiens
aaggagttacatcttaacac

SEQ ID NO: 310 - DNA, 20 bp, Homo sapiens
taaaatgcaagatacaatgg

SEQ ID NO: 311 - DNA, 20 bp, Homo sapiens
acaagtgtctaccagagaga

SEQ ID NO: 312 - DNA, 20 bp, Homo sapiens
gcgctctggcaccttctctc

SEQ ID NO: 313 - DNA, 20 bp, Homo sapiens
ctgctgcaccttctgagctg

SEQ ID NO: 314 - DNA, 20 bp, Homo sapiens
tcttccctacctagaaacga

SEQ ID NO: 315 - DNA, 20 bp, Mus musculus
aatctggccaggtggtataa

SEQ ID NO: 316 - DNA, 20 bp, Mus musculus
aatatgagaaagtatcgaat

SEQ ID NO: 317 - DNA, 20 bp, Mus musculus
atcactgcaggtccatggtc

SEQ ID NO: 318 - DNA, 20 bp, Mus musculus
atgtgcacagtactggccaa

SEQ ID NO: 319 - DNA, 20 bp, Mus musculus
ggcagcatgtgttcggaagt

SEQ ID NO: 320 - DNA, 20 bp, Mus musculus
aagaagtttagaaatgaagc

SEQ ID NO: 321 - DNA, 20 bp, Mus musculus
gccacaccatgagccagaaa

SEQ ID NO: 322 - DNA, 20 bp, Mus musculus
cctttcttgcagatggaaaa

SEQ ID NO: 323 - DNA, 20 bp, Mus musculus
gtactttgctccttctatta

SEQ ID NO: 324 - DNA, 20 bp, Mus musculus
agaaatgaagctggtgactc

SEQ ID NO: 325 - DNA, 20 bp, Mus musculus
gtttagcatgacaactgctt

SEQ ID NO: 326 - DNA, 20 bp, Mus musculus
gcccgatgcccgcactgcaa

SEQ ID NO: 327 - DNA, 20 bp, Mus musculus
tgacagagaaatggtgttta

SEQ ID NO: 328 - RNA, 25 nt, Mus musculus
ccuggacaacuuccuucguaagaaa

SEQ ID NO: 329 - RNA, 19 nt, Homo sapiens
gugucccuauggaaggaaa

SEQ ID NO: 330 - RNA, 19 nt, Homo sapiens
caacuuccuucguaagaaa

SEQ ID NO: 331 - DNA, 21 bp, Mus musculus
agcgaggccacacagatatta

SEQ ID NO: 332 - DNA, 21 bp, Mus musculus
gctatgatgaccgcttcattg

SEQ ID NO: 333 - DNA, 21 bp, Mus musculus
tggtctgagccgtacccatta

SEQ ID NO: 334 - DNA, 21 bp, Mus musculus
ctgtgtacagaggcgagattt

SEQ ID NO: 335 - DNA, 25 bp, Mus musculus
cctggacaacttccttcgtaagaaa

SEQ ID NO: 336 - DNA, 19 bp, Homo sapiens
gtgtccctatggaaggaaa

SEQ ID NO: 337 - DNA, 19 bp, Homo sapiens
caacttccttcgtaagaaa

SEQ ID NO: 338 - DNA, 20 bp, Homo sapiens
aagctggcctacgagtctga

SEQ ID NO: 339 - DNA, 20 bp, Homo sapiens
gcgggactagagggagctga

SEQ ID NO: 340 - DNA, 20 bp, Homo sapiens
cagctccctctagtcccgcg

SEQ ID NO: 341 - DNA, 20 bp, Homo sapiens
caggacgctgtggatctccg

SEQ ID NO: 342 - DNA, 20 bp, Homo sapiens
aacatacttgtcattgacga

SEQ ID NO: 343 - DNA, 20 bp, Homo sapiens
ctcacctgtgatgggcacgt

SEQ ID NO: 344 - DNA, 20 bp, Homo sapiens
aacacgggacagccaccgag

SEQ ID NO: 345 - DNA, 20 bp, Homo sapiens
cgacagattcattgtgaagc

SEQ ID NO: 346 - DNA, 20 bp, Homo sapiens
acaccatcacgacgcgtggg

SEQ ID NO: 347 - DNA, 20 bp, Homo sapiens
tcccagccatgggaacaagg

SEQ ID NO: 348 - DNA, 20 bp, Homo sapiens
ggagtggaagcgcttcatcg

SEQ ID NO: 349 - DNA, 20 bp, Homo sapiens
ttaggggtgccaccaccccg

SEQ ID NO: 350 - DNA, 20 bp, Homo sapiens
gacacataccgtgacctcca

SEQ ID NO: 351 - DNA, 20 bp, Homo sapiens
ccggcccagtgggtcatcag

SEQ ID NO: 352 - DNA, 20 bp, Homo sapiens
cctggaactgcagatgaagg

SEQ ID NO: 353 - DNA, 20 bp, Homo sapiens
gtcctctccctcccagccat

SEQ ID NO: 354 - DNA, 20 bp, Homo sapiens
tccccagggtcccgccaaga

SEQ ID NO: 355 - DNA, 20 bp, Homo sapiens
agtgagcagtgcagcctgga

SEQ ID NO: 356 - DNA, 20 bp, Homo sapiens
tgtcctctccctcccagcca

SEQ ID NO: 357 - DNA, 20 bp, Homo sapiens
ctggactgggatgaaggtga

SEQ ID NO: 358 - DNA, 20 bp, Homo sapiens
ggggtgggcccggctcacca

SEQ ID NO: 359 - DNA, 20 bp, Homo sapiens
caccaccccgcgggactaga

SEQ ID NO: 360 - DNA, 20 bp, Homo sapiens
ctgctgccactgcccccgct

SEQ ID NO: 361 - DNA, 20 bp, Homo sapiens
cggcccgacgtgcccatcac

SEQ ID NO: 362 - DNA, 20 bp, Homo sapiens
cactgcccccgctaggtgcg

SEQ ID NO: 363 - DNA, 20 bp, Homo sapiens
atacacgctggcctgctcct

SEQ ID NO: 364 - DNA, 20 bp, Homo sapiens
caaacactgtgatgtctgtg

SEQ ID NO: 365 - DNA, 20 bp, Homo sapiens
gcgggaccctggggatgcct

SEQ ID NO: 366 - DNA, 20 bp, Homo sapiens
gcgggagcgccagacctcac

SEQ ID NO: 367 - DNA, 20 bp, Homo sapiens
aggacaggcttctctccaca

SEQ ID NO: 368 - DNA, 20 bp, Homo sapiens
gcagacaccaacacggtgct

SEQ ID NO: 369 - DNA, 20 bp, Homo sapiens
ccaccaccccgcgggactag

SEQ ID NO: 370 - DNA, 20 bp, Homo sapiens
atccccagggtcccgccaag

SEQ ID NO: 371 - DNA, 20 bp, Homo sapiens
cctggaggaaggagcagcct

SEQ ID NO: 372 - DNA, 20 bp, Homo sapiens
agagccagatgtcggaactt

SEQ ID NO: 373 - DNA, 20 bp, Homo sapiens
atgacccactgggccggcac

SEQ ID NO: 374 - DNA, 20 bp, Homo sapiens
gcagctttgggcccacagac

SEQ ID NO: 375 - DNA, 20 bp, Homo sapiens
actctctgttagcagagagc

SEQ ID NO: 376 - DNA, 20 bp, Homo sapiens
ccaggaaggaaatgcaccta

SEQ ID NO: 377 - DNA, 20 bp, Homo sapiens
aggcaccactcacctgtgat

SEQ ID NO: 378 - DNA, 20 bp, Homo sapiens
ctgggcccgtgccggcccag

SEQ ID NO: 379 - DNA, 20 bp, Homo sapiens
cagccagctgctgggggtcc

SEQ ID NO: 380 - DNA, 20 bp, Homo sapiens
tccactcctgccgctcgcct

SEQ ID NO: 381 - DNA, 20 bp, Homo sapiens
cgtccaggcagacaccaaca

SEQ ID NO: 382 - DNA, 20 bp, Homo sapiens
cccacccacatcagtccttc

SEQ ID NO: 383 - DNA, 20 bp, Homo sapiens
gccagctcttgacccggcct

SEQ ID NO: 384 - DNA, 20 bp, Homo sapiens
ctgccctccttttcctcttc

SEQ ID NO: 385 - DNA, 20 bp, Homo sapiens
ccagccccaccatgagtctg

SEQ ID NO: 386 - DNA, 20 bp, Homo sapiens
gccgattcttccacccagag

SEQ ID NO: 387 - DNA, 20 bp, Homo sapiens
ctcccagaagaggaaaagga

SEQ ID NO: 388 - DNA, 20 bp, Homo sapiens
gtggggcagggcaggcagcc

SEQ ID NO: 389 - DNA, 20 bp, Homo sapiens
gggtcaagagctggccgctg

SEQ ID NO: 390 - DNA, 20 bp, Homo sapiens
atgccccctgatgacccact

SEQ ID NO: 391 - DNA, 20 bp, Homo sapiens
agccttctctgcctttggcc

SEQ ID NO: 392 - DNA, 20 bp, Homo sapiens
ctctgcctttggccgggcca

SEQ ID NO: 393 - DNA, 20 bp, Homo sapiens
ggaacccagcctgccctccc

SEQ ID NO: 394 - DNA, 20 bp, Homo sapiens
ggcaggagcctcgcacctag

SEQ ID NO: 395 - DNA, 20 bp, Homo sapiens
tcccagaccagcacatcctg

SEQ ID NO: 396 - DNA, 20 bp, Homo sapiens
gtgagcagtgcagcctggat

SEQ ID NO: 397 - DNA, 20 bp, Homo sapiens
gagccagatgtcggaacttt

SEQ ID NO: 398 - DNA, 20 bp, Homo sapiens
ggccgatggcaagccttgct

SEQ ID NO: 399 - DNA, 20 bp, Homo sapiens
aggagcctcgcacctagcgg

SEQ ID NO: 400 - DNA, 20 bp, Homo sapiens
aggtccccaagaggaaaaca

SEQ ID NO: 401 - DNA, 20 bp, Homo sapiens
cgctgaggaggcctcggccc

SEQ ID NO: 402 - DNA, 20 bp, Homo sapiens
gaggacagccacagccgtca

SEQ ID NO: 403 - DNA, 20 bp, Homo sapiens
cagccccaccatgagtctgt

SEQ ID NO: 404 - DNA, 20 bp, Homo sapiens
accccccagagccccaagca

SEQ ID NO: 405 - DNA, 20 bp, Homo sapiens
gaggcaccactcacctgtga

SEQ ID NO: 406 - DNA, 20 bp, Homo sapiens
ccaagaggaaaacagggcac

SEQ ID NO: 407 - DNA, 20 bp, Homo sapiens
gtacgtctcccaggattgcc

SEQ ID NO: 408 - DNA, 20 bp, Homo sapiens
cacagcctccaccaggtgcg

SEQ ID NO: 409 - DNA, 20 bp, Homo sapiens
gatctcggcagccagctgct

SEQ ID NO: 410 - DNA, 20 bp, Homo sapiens
cagccttctctgcctttggc

SEQ ID NO: 411 - DNA, 20 bp, Homo sapiens
cagaagtgacacttacctca

SEQ ID NO: 412 - DNA, 20 bp, Homo sapiens
gctggccgctgaggaggcct

SEQ ID NO: 413 - DNA, 20 bp, Homo sapiens
cagctccctctagtcccgcg

SEQ ID NO: 414 - DNA, 20 bp, Homo sapiens
cggggtgggcccggctcacc

SEQ ID NO: 415 - DNA, 20 bp, Homo sapiens
gacacataccgtgacctcca

SEQ ID NO: 416 - DNA, 20 bp, Homo sapiens
caggaaggaaatgcacctat

SEQ ID NO: 417 - DNA, 20 bp, Homo sapiens
agtggccagcacccatggcc

SEQ ID NO: 418 - DNA, 20 bp, Homo sapiens
ctctcctattcttcccagca

SEQ ID NO: 419 - DNA, 20 bp, Homo sapiens
gcccgagtccaggcaatcct

SEQ ID NO: 420 - DNA, 20 bp, Homo sapiens
caccttcatctgcagttcca

SEQ ID NO: 421 - DNA, 20 bp, Homo sapiens
ggcacaggcagacaggtgag

SEQ ID NO: 422 - DNA, 20 bp, Homo sapiens
agcacccatggcccggccaa

SEQ ID NO: 423 - DNA, 20 bp, Homo sapiens
ccacaggcagcttactcact

SEQ ID NO: 424 - DNA, 20 bp, Homo sapiens
ttcctgtgctccaaagtgag

SEQ ID NO: 425 - DNA, 20 bp, Homo sapiens
accgcagccttctctgcctt

SEQ ID NO: 426 - DNA, 20 bp, Homo sapiens
gggagccaatgcccgagtcc

SEQ ID NO: 427 - DNA, 20 bp, Homo sapiens
ttcccagcaaggcttgccat

SEQ ID NO: 428 - DNA, 20 bp, Homo sapiens
agccagatgtcggaactttg

SEQ ID NO: 429 - DNA, 20 bp, Homo sapiens
tacacgggctacagtcccta

SEQ ID NO: 430 - DNA, 20 bp, Homo sapiens
tctgtgttagaccctcttgg

SEQ ID NO: 431 - DNA, 20 bp, Homo sapiens
aagctgcccccagcgctctg

SEQ ID NO: 432 - DNA, 20 bp, Homo sapiens
ctttggggggttcgaggagg

SEQ ID NO: 433 - DNA, 20 bp, Homo sapiens
gggccgatggcaagccttgc

SEQ ID NO: 434 - DNA, 20 bp, Homo sapiens
cacaggcagcttactcactg

SEQ ID NO: 435 - DNA, 20 bp, Homo sapiens
cccagaccagcacatcctgc

SEQ ID NO: 436 - DNA, 20 bp, Homo sapiens
aggctgggttccataccata

SEQ ID NO: 437 - DNA, 20 bp, Homo sapiens
ggacttctaattgctgagaa

SEQ ID NO: 438 - DNA, 20 bp, Homo sapiens
ctcaaattcccacagactca

SEQ ID NO: 439 - DNA, 20 bp, Homo sapiens
aaaacagggcacaggcagac

SEQ ID NO: 440 - DNA, 20 bp, Homo sapiens
ccagatgtcggaactttggg

SEQ ID NO: 441 - DNA, 20 bp, Homo sapiens
ctccctctagtcccgcgggg

SEQ ID NO: 442 - DNA, 20 bp, Homo sapiens
agcccccagtgcagagccca

SEQ ID NO: 443 - DNA, 20 bp, Homo sapiens
cctggacgcccagcttctgc

SEQ ID NO: 444 - DNA, 20 bp, Homo sapiens
caggggctggcaggagcccg

SEQ ID NO: 445 - DNA, 20 bp, Homo sapiens
ccttgttcccatggctggga

SEQ ID NO: 446 - DNA, 20 bp, Homo sapiens
ctcatctgccacagagcgct

SEQ ID NO: 447 - DNA, 20 bp, Homo sapiens
ggcagacaccaacacggtgc

SEQ ID NO: 448 - DNA, 20 bp, Homo sapiens
tccctcttgattcctcttcc

SEQ ID NO: 449 - DNA, 20 bp, Homo sapiens
ccctcccagccatgggaaca

SEQ ID NO: 450 - DNA, 20 bp, Homo sapiens
gcgtaagaagccactcactt

SEQ ID NO: 451 - DNA, 20 bp, Homo sapiens
tgtgtttcccccgcacctgg

SEQ ID NO: 452 - DNA, 20 bp, Homo sapiens
ctgagaccagtggtcatcga

SEQ ID NO: 453 - DNA, 20 bp, Homo sapiens
gggcagcgacctgagaccag

SEQ ID NO: 454 - DNA, 20 bp, Homo sapiens
agcaattagaagtccctgca

SEQ ID NO: 455 - DNA, 20 bp, Homo sapiens
tgggtgagctggtgaaacac

SEQ ID NO: 456 - DNA, 20 bp, Homo sapiens
ctgttagcagagagctggac

SEQ ID NO: 457 - DNA, 20 bp, Homo sapiens
cccctgatgacccactgggc

SEQ ID NO: 458 - DNA, 20 bp, Homo sapiens
gttcacaccatcacgacgcg

SEQ ID NO: 459 - DNA, 20 bp, Homo sapiens
tgtccaggctgggcccgtgc

SEQ ID NO: 460 - DNA, 20 bp, Homo sapiens
acacagacctatgccccatc

SEQ ID NO: 461 - DNA, 20 bp, Homo sapiens
ggctgcctgccctgccccac

SEQ ID NO: 462 - DNA, 20 bp, Homo sapiens
ccataggtgcatttccttcc

SEQ ID NO: 463 - DNA, 20 bp, Homo sapiens
caggctgggttccataccat

SEQ ID NO: 464 - DNA, 20 bp, Homo sapiens
gccccatcacagcctccacc

SEQ ID NO: 465 - DNA, 20 bp, Homo sapiens
tgccctccttttcctcttct

SEQ ID NO: 466 - DNA, 20 bp, Homo sapiens
gccagatgtcggaactttgg

SEQ ID NO: 467 - DNA, 20 bp, Homo sapiens
caggcagacaggtgagagga

SEQ ID NO: 468 - DNA, 20 bp, Homo sapiens
ccaggagtctgagctatgag

SEQ ID NO: 469 - DNA, 20 bp, Homo sapiens
gctccaggttgggagcctta

SEQ ID NO: 470 - DNA, 20 bp, Homo sapiens
ctcacctgtgatgggcacgt

SEQ ID NO: 471 - DNA, 20 bp, Homo sapiens
agctggcctacgagtctgac

SEQ ID NO: 472 - DNA, 20 bp, Homo sapiens
gtgggtgggggcagtgggta

SEQ ID NO: 473 - DNA, 20 bp, Homo sapiens
catctgcagttccagggccg

SEQ ID NO: 474 - DNA, 20 bp, Homo sapiens
gatgacccactgggccggca

SEQ ID NO: 475 - DNA, 20 bp, Homo sapiens
tgacctccaaggcgagcggc

SEQ ID NO: 476 - DNA, 20 bp, Homo sapiens
ggatctcggcagccagctgc

SEQ ID NO: 477 - DNA, 20 bp, Homo sapiens
tccttttcctcttctgggag

SEQ ID NO: 478 - DNA, 20 bp, Homo sapiens
cacgacgcgtgggtggcaag

SEQ ID NO: 479 - DNA, 20 bp, Homo sapiens
ttcacaccatcacgacgcgt

SEQ ID NO: 480 - DNA, 20 bp, Homo sapiens
gcaggagcctcgcacctagc

SEQ ID NO: 481 - DNA, 20 bp, Homo sapiens
cacccctaaggctcccaacc

SEQ ID NO: 482 - DNA, 20 bp, Homo sapiens
ttgtccttgcttggggctct

SEQ ID NO: 483 - DNA, 20 bp, Homo sapiens
caggacaggcttctctccac

SEQ ID NO: 484 - DNA, 20 bp, Homo sapiens
cacctggtggaggctgtgat

SEQ ID NO: 485 - DNA, 20 bp, Homo sapiens
cgtctgtgggagccagtctg

SEQ ID NO: 486 - DNA, 20 bp, Homo sapiens
ccccccaaagttccgacatc

SEQ ID NO: 487 - DNA, 20 bp, Homo sapiens
aggcagcctggccaaggagc

SEQ ID NO: 488 - DNA, 20 bp, Homo sapiens
tctgcctttggccgggccat

SEQ ID NO: 489 - DNA, 20 bp, Homo sapiens
ggacaggcttctctccacag

SEQ ID NO: 490 - DNA, 20 bp, Homo sapiens
acgtgcccatcacaggtgag

SEQ ID NO: 491 - DNA, 20 bp, Homo sapiens
agagagtgagcagtgcagcc

SEQ ID NO: 492 - DNA, 20 bp, Homo sapiens
cgcaggaagttgtccaggct

SEQ ID NO: 493 - DNA, 20 bp, Homo sapiens
ggctgggagctcagatccat

SEQ ID NO: 494 - DNA, 20 bp, Homo sapiens
cagctcacccagcaccgtgt

SEQ ID NO: 495 - DNA, 20 bp, Homo sapiens
ccagcacatcctgcgggaac

SEQ ID NO: 496 - DNA, 20 bp, Homo sapiens
gacctccttgttcccatggc

SEQ ID NO: 497 - DNA, 20 bp, Homo sapiens
ggggttcgaggaggaggccc

SEQ ID NO: 498 - DNA, 20 bp, Homo sapiens
cagagaaggctgcggtggct

SEQ ID NO: 499 - DNA, 20 bp, Homo sapiens
gggagtgagtccagcgtctg

SEQ ID NO: 500 - DNA, 20 bp, Homo sapiens
caggagcctcgcacctagcg

SEQ ID NO: 501 - DNA, 20 bp, Homo sapiens
ggaggaggccctggtgagcc

SEQ ID NO: 502 - DNA, 20 bp, Homo sapiens
caagcaaggacaaaaatggc

SEQ ID NO: 503 - DNA, 20 bp, Homo sapiens
cgtcagggcaccccaaggcc

SEQ ID NO: 504 - DNA, 20 bp, Homo sapiens
gctggcagtgaactggtttc

SEQ ID NO: 505 - DNA, 20 bp, Homo sapiens
acctccttgttcccatggct

SEQ ID NO: 506 - DNA, 20 bp, Homo sapiens
tcccgcaggatgtgctggtc

SEQ ID NO: 507 - DNA, 20 bp, Homo sapiens
agggactgtagcccgtgtaa

SEQ ID NO: 508 - DNA, 20 bp, Homo sapiens
ccagtactctcgaggtggaa

SEQ ID NO: 509 - DNA, 20 bp, Homo sapiens
aattcccacagactcatggt

SEQ ID NO: 510 - DNA, 20 bp, Homo sapiens
cccaccccgagccccttaca

SEQ ID NO: 511 - DNA, 20 bp, Homo sapiens
gtgcatttccttcctggaag

SEQ ID NO: 512 - DNA, 20 bp, Homo sapiens
tcagcggccagctcttgacc

SEQ ID NO: 513 - DNA, 20 bp, Homo sapiens
ggcccggccaaaggcagaga

SEQ ID NO: 514 - DNA, 20 bp, Homo sapiens
acagagcgctgggggcagct

SEQ ID NO: 515 - DNA, 20 bp, Homo sapiens
tcttgattcctcttccagga

SEQ ID NO: 516 - DNA, 20 bp, Homo sapiens
gcaaggacaaaaatggccgg

SEQ ID NO: 517 - DNA, 20 bp, Homo sapiens
cagggcaggcagcctggcca

SEQ ID NO: 518 - DNA, 20 bp, Homo sapiens
atctcggcagccagctgctg

SEQ ID NO: 519 - DNA, 20 bp, Homo sapiens
cccgcaggatgtgctggtct

SEQ ID NO: 520 - DNA, 20 bp, Homo sapiens
ggctccaggttgggagcctt

SEQ ID NO: 521 - DNA, 20 bp, Homo sapiens
caacacggtgctgggtgagc

SEQ ID NO: 522 - DNA, 20 bp, Homo sapiens
gcagccgtgtccctatggta

SEQ ID NO: 523 - DNA, 20 bp, Homo sapiens
tgtccttgcttggggctctg

SEQ ID NO: 524 - DNA, 20 bp, Homo sapiens
tcatggtggggctggcttcc

SEQ ID NO: 525 - DNA, 20 bp, Homo sapiens
gaagctgggctattcatcca

SEQ ID NO: 526 - DNA, 20 bp, Homo sapiens
gaccctcttggcgggaccct

SEQ ID NO: 527 - DNA, 20 bp, Homo sapiens
ggaaaggcagggggcgcggg

SEQ ID NO: 528 - DNA, 20 bp, Homo sapiens
aggtctgtgttagaccctct

SEQ ID NO: 529 - DNA, 20 bp, Homo sapiens
ctcagctccctctagtcccg

SEQ ID NO: 530 - DNA, 20 bp, Homo sapiens
tagggactgtagcccgtgta

SEQ ID NO: 531 - DNA, 20 bp, Homo sapiens
agggggcataaacctgcaga

SEQ ID NO: 532 - DNA, 20 bp, Homo sapiens
ctcccaggattgcctggact

SEQ ID NO: 533 - DNA, 20 bp, Homo sapiens
gggatgaaggtgaaggccgc

SEQ ID NO: 534 - DNA, 20 bp, Homo sapiens
tgcagagcccaggggctggc

SEQ ID NO: 535 - DNA, 20 bp, Homo sapiens
gaatcggcacttgatcccat

SEQ ID NO: 536 - DNA, 20 bp, Homo sapiens
ccgaggctgctccttcctcc

SEQ ID NO: 537 - DNA, 20 bp, Homo sapiens
ccagcttctgcaggacgctg

SEQ ID NO: 538 - DNA, 20 bp, Homo sapiens
gggccggcacgggcccagcc

SEQ ID NO: 539 - DNA, 20 bp, Homo sapiens
tgaggtctggcgctcccgct

SEQ ID NO: 540 - DNA, 20 bp, Homo sapiens
ttggggtgccctgacggctg

SEQ ID NO: 541 - DNA, 20 bp, Homo sapiens
actagagggagctgagggca

SEQ ID NO: 542 - DNA, 20 bp, Homo sapiens
ccagttcccgcaggatgtgc

SEQ ID NO: 543 - DNA, 20 bp, Homo sapiens
tatgccccctgatgacccac

SEQ ID NO: 544 - DNA, 20 bp, Homo sapiens
gtgagaggagagcattggca

SEQ ID NO: 545 - DNA, 20 bp, Homo sapiens
agcttactcactggggtgct

SEQ ID NO: 546 - DNA, 20 bp, Homo sapiens
atcacagcctccaccaggtg

SEQ ID NO: 547 - DNA, 20 bp, Homo sapiens
actgaagtggccagcaccca

SEQ ID NO: 548 - DNA, 20 bp, Homo sapiens
gccggcccagtgggtcatca

SEQ ID NO: 549 - DNA, 20 bp, Homo sapiens
cctgcagaagctgggcgtcc

SEQ ID NO: 550 - DNA, 20 bp, Homo sapiens
gcaccgtgttggtgtctgcc

SEQ ID NO: 551 - DNA, 20 bp, Homo sapiens
ggccctggaactgcagatga

SEQ ID NO: 552 - DNA, 20 bp, Homo sapiens
gtccttgcttggggctctgg

SEQ ID NO: 553 - DNA, 20 bp, Homo sapiens
ctccctggagagccagatgt

SEQ ID NO: 554 - DNA, 20 bp, Homo sapiens
aaattcccacagactcatgg

SEQ ID NO: 555 - DNA, 20 bp, Homo sapiens
tcatctgccacagagcgctg

SEQ ID NO: 556 - DNA, 20 bp, Homo sapiens
agtcggcagggacactgaag

SEQ ID NO: 557 - DNA, 20 bp, Homo sapiens
actctcgaggtggaaaggca

SEQ ID NO: 558 - DNA, 20 bp, Homo sapiens
cccagtgagtaagctgcctg

SEQ ID NO: 559 - DNA, 20 bp, Homo sapiens
agagggtgcaaagaactctc

SEQ ID NO: 560 - DNA, 20 bp, Homo sapiens
cacgatcccgtcagactcgt

SEQ ID NO: 561 - DNA, 20 bp, Homo sapiens
tctgcactgggggctcctga

SEQ ID NO: 562 - DNA, 20 bp, Homo sapiens
cagggggcataaacctgcag

SEQ ID NO: 563 - DNA, 20 bp, Homo sapiens
tgaggacagccacagccgtc

SEQ ID NO: 564 - DNA, 20 bp, Homo sapiens
gtttcccccgcacctggtgg

SEQ ID NO: 565 - DNA, 20 bp, Homo sapiens
ttaggggtgccaccaccccg

SEQ ID NO: 566 - DNA, 20 bp, Homo sapiens
actggggtgctgggacttgt

SEQ ID NO: 567 - DNA, 20 bp, Homo sapiens
ctcactcccgtacgtctccc

SEQ ID NO: 568 - DNA, 20 bp, Homo sapiens
aggggctggcaggagcccgt

SEQ ID NO: 569 - DNA, 20 bp, Homo sapiens
tccttgttcccatggctggg

SEQ ID NO: 570 - DNA, 20 bp, Homo sapiens
gccaaaggcagagaaggctg

SEQ ID NO: 571 - DNA, 20 bp, Homo sapiens
cacgggctcctgccagcccc

SEQ ID NO: 572 - DNA, 20 bp, Homo sapiens
ccacagcgtcctgcagaagc

SEQ ID NO: 573 - DNA, 20 bp, Homo sapiens
acgggctcctgccagcccct

SEQ ID NO: 574 - DNA, 20 bp, Homo sapiens
atgggagcaacgtggccatg

SEQ ID NO: 575 - DNA, 20 bp, Homo sapiens
cccaaggccgggtcaagagc

SEQ ID NO: 576 - DNA, 20 bp, Homo sapiens
aattgctgagaaggggccga

SEQ ID NO: 577 - DNA, 20 bp, Homo sapiens
gggcaggagtgaggagggcc

SEQ ID NO: 578 - DNA, 20 bp, Homo sapiens
ggcgggaccctggggatgcc

SEQ ID NO: 579 - DNA, 20 bp, Homo sapiens
ggggctggcaggagcccgtg

SEQ ID NO: 580 - DNA, 20 bp, Homo sapiens
ttccgacatctggctctcca

SEQ ID NO: 581 - DNA, 20 bp, Homo sapiens
gtgctgcccttgccagccac

SEQ ID NO: 582 - DNA, 20 bp, Homo sapiens
actcctgccgctcgccttgg

SEQ ID NO: 583 - DNA, 20 bp, Homo sapiens
gtggacttcttccggaagct

SEQ ID NO: 584 - DNA, 20 bp, Homo sapiens
ccagtgcagagcccaggggc

SEQ ID NO: 585 - DNA, 20 bp, Homo sapiens
ggggcagtggcagcagcttt

SEQ ID NO: 586 - DNA, 20 bp, Homo sapiens
gggactgtagcccgtgtaag

SEQ ID NO: 587 - DNA, 20 bp, Homo sapiens
ccacagactcatggtggggc

SEQ ID NO: 588 - DNA, 20 bp, Homo sapiens
aacacgggacagccaccgag

SEQ ID NO: 589 - DNA, 20 bp, Homo sapiens
gcaaagaactctctggaggt

SEQ ID NO: 590 - DNA, 20 bp, Homo sapiens
tgggcccgtgccggcccagt

SEQ ID NO: 591 - DNA, 20 bp, Homo sapiens
ctcctgccggggcatcctgc

SEQ ID NO: 592 - DNA, 20 bp, Homo sapiens
aggcagacaggtgagaggaa

SEQ ID NO: 593 - DNA, 20 bp, Homo sapiens
aggcaatcctgggagacgta

SEQ ID NO: 594 - DNA, 20 bp, Homo sapiens
tcagaccagtactctcgagg

SEQ ID NO: 595 - DNA, 20 bp, Homo sapiens
aacatacttgtcattgacga

SEQ ID NO: 596 - DNA, 20 bp, Homo sapiens
ggcagcttggccgctctggg

SEQ ID NO: 597 - DNA, 20 bp, Homo sapiens
gagttctttgcaccctctgc

SEQ ID NO: 598 - DNA, 20 bp, Homo sapiens
gccacaggcagcttactcac

SEQ ID NO: 599 - DNA, 20 bp, Homo sapiens
aggctgcctgccctgcccca

SEQ ID NO: 600 - DNA, 20 bp, Homo sapiens
ccggcccagtgggtcatcag

SEQ ID NO: 601 - DNA, 20 bp, Homo sapiens
ctctcgaggtggaaaggcag

SEQ ID NO: 602 - DNA, 20 bp, Homo sapiens
gattgcctggactcgggcat

SEQ ID NO: 603 - DNA, 20 bp, Homo sapiens
tccttgcttggggctctggg

SEQ ID NO: 604 - DNA, 20 bp, Homo sapiens
gcagagaaggctgcggtggc

SEQ ID NO: 605 - DNA, 20 bp, Homo sapiens
accgtgacctccaaggcgag

SEQ ID NO: 606 - DNA, 20 bp, Homo sapiens
caggacgctgtggatctccg

SEQ ID NO: 607 - DNA, 20 bp, Homo sapiens
aggaagcagccgtgtcccta

SEQ ID NO: 608 - DNA, 20 bp, Homo sapiens
acgcaggaagttgtccaggc

SEQ ID NO: 609 - DNA, 20 bp, Homo sapiens
gaggtccccaagaggaaaac

SEQ ID NO: 610 - DNA, 20 bp, Homo sapiens
cccccagcttcttcccatcc

SEQ ID NO: 611 - DNA, 20 bp, Homo sapiens
attcccacagactcatggtg

SEQ ID NO: 612 - DNA, 20 bp, Homo sapiens
tccaaggcgagcggcaggag

SEQ ID NO: 613 - DNA, 20 bp, Homo sapiens
gctgggagctcagatccata

SEQ ID NO: 614 - DNA, 20 bp, Homo sapiens
tgggggcccaggcatcccca

SEQ ID NO: 615 - DNA, 20 bp, Homo sapiens
gggtgcaaagaactctctgg

SEQ ID NO: 616 - DNA, 20 bp, Homo sapiens
gcgggactagagggagctga

SEQ ID NO: 617 - DNA, 20 bp, Homo sapiens
actggagaagaagaagatcc

SEQ ID NO: 618 - DNA, 20 bp, Homo sapiens
ccagctcttgacccggcctt

SEQ ID NO: 619 - DNA, 20 bp, Homo sapiens
gaactttggggggttcgagg

SEQ ID NO: 620 - DNA, 20 bp, Homo sapiens
gaaaccagttcactgccagc

SEQ ID NO: 621 - DNA, 20 bp, Homo sapiens
acagccgtcagggcacccca

SEQ ID NO: 622 - DNA, 20 bp, Homo sapiens
ccaccccgagccccttacac

SEQ ID NO: 623 - DNA, 20 bp, Homo sapiens
tctcggcagccagctgctgg

SEQ ID NO: 624 - DNA, 20 bp, Homo sapiens
agagagctggactgggatga

SEQ ID NO: 625 - DNA, 20 bp, Homo sapiens
cctttccacctcgagagtac

SEQ ID NO: 626 - DNA, 20 bp, Homo sapiens
aagctggcctacgagtctga

SEQ ID NO: 627 - DNA, 20 bp, Homo sapiens
gtctgtgggagccagtctgt

SEQ ID NO: 628 - DNA, 20 bp, Homo sapiens
agacctatgccccatcaggc

SEQ ID NO: 629 - DNA, 20 bp, Homo sapiens
tgggaagaagctgggggccc

SEQ ID NO: 630 - DNA, 20 bp, Homo sapiens
ctgtggagagaagcctgtcc

SEQ ID NO: 631 - DNA, 20 bp, Homo sapiens
gggacttctaattgctgaga

SEQ ID NO: 632 - DNA, 20 bp, Homo sapiens
ggactcgggcattggctccc

SEQ ID NO: 633 - DNA, 20 bp, Homo sapiens
catctgccacagagcgctgg

SEQ ID NO: 634 - DNA, 20 bp, Homo sapiens
cttctgggagtggaggctcc

SEQ ID NO: 635 - DNA, 20 bp, Homo sapiens
gcccccagtgcagagcccag

SEQ ID NO: 636 - DNA, 20 bp, Homo sapiens
tttgtccttgcttggggctc

SEQ ID NO: 637 - DNA, 20 bp, Homo sapiens
gtggggctggcttccaggac

SEQ ID NO: 638 - DNA, 20 bp, Homo sapiens
tcaagagctggccgctgagg

SEQ ID NO: 639 - DNA, 20 bp, Homo sapiens
cctctagtcccgcggggtgg

SEQ ID NO: 640 - DNA, 20 bp, Homo sapiens
gctcatctgccacagagcgc

SEQ ID NO: 641 - DNA, 20 bp, Homo sapiens
catgagtctgtgggaatttg

SEQ ID NO: 642 - DNA, 20 bp, Homo sapiens
tgcgaggctcctgcctgatg

SEQ ID NO: 643 - DNA, 20 bp, Homo sapiens
ggagtgagtccagcgtctgt

SEQ ID NO: 644 - DNA, 20 bp, Homo sapiens
tgcaaagaactctctggagg

SEQ ID NO: 645 - DNA, 20 bp, Homo sapiens
cacagcgtcctgcagaagct

SEQ ID NO: 646 - DNA, 20 bp, Homo sapiens
cagcttactcactggggtgc

SEQ ID NO: 647 - DNA, 20 bp, Homo sapiens
actgatgtgggtgggggcag

SEQ ID NO: 648 - DNA, 20 bp, Homo sapiens
gcaggatgtgctggtctggg

SEQ ID NO: 649 - DNA, 20 bp, Homo sapiens
tcacagtgtttgtgccatcc

SEQ ID NO: 650 - DNA, 20 bp, Homo sapiens
gtttgtgccatcctggagga

SEQ ID NO: 651 - DNA, 20 bp, Homo sapiens
tcctgaaggactgatgtggg

SEQ ID NO: 652 - DNA, 20 bp, Homo sapiens
tgttagcagagagctggact

SEQ ID NO: 653 - DNA, 20 bp, Homo sapiens
cagtgtttgtgccatcctgg

SEQ ID NO: 654 - DNA, 20 bp, Homo sapiens
agtctgtcagggcctctggg

SEQ ID NO: 655 - DNA, 20 bp, Homo sapiens
tctcgaggtggaaaggcagg

SEQ ID NO: 656 - DNA, 20 bp, Homo sapiens
agactggctcccacagacgc

SEQ ID NO: 657 - DNA, 20 bp, Homo sapiens
agccactcactttggagcac

SEQ ID NO: 658 - DNA, 20 bp, Homo sapiens
tcccaggattgcctggactc

SEQ ID NO: 659 - DNA, 20 bp, Homo sapiens
cctggaactgcagatgaagg

SEQ ID NO: 660 - DNA, 20 bp, Homo sapiens
ggggcgcttcccacagctcc

SEQ ID NO: 661 - DNA, 20 bp, Homo sapiens
cagcccctgggctctgcact

SEQ ID NO: 662 - DNA, 20 bp, Homo sapiens
gcgcgggtgggtagtcggca

SEQ ID NO: 663 - DNA, 20 bp, Homo sapiens
gccccaagcaaggacaaaaa

SEQ ID NO: 664 - DNA, 20 bp, Homo sapiens
agcctggatgggaagaagct

SEQ ID NO: 665 - DNA, 20 bp, Homo sapiens
cagctcttgacccggccttg

SEQ ID NO: 666 - DNA, 20 bp, Homo sapiens
taggggtgccaccaccccgc

SEQ ID NO: 667 - DNA, 20 bp, Homo sapiens
tccactcccagaagaggaaa

SEQ ID NO: 668 - DNA, 20 bp, Homo sapiens
ggaagcgcttcatcgaggag

SEQ ID NO: 669 - DNA, 20 bp, Homo sapiens
gcatcctgctggcagtgaac

SEQ ID NO: 670 - DNA, 20 bp, Homo sapiens
tggatgaatagcccagcttc

SEQ ID NO: 671 - DNA, 20 bp, Homo sapiens
acacgggacagccaccgagc

SEQ ID NO: 672 - DNA, 20 bp, Homo sapiens
gggctcctgaaggactgatg

SEQ ID NO: 673 - DNA, 20 bp, Homo sapiens
cagcctggatgggaagaagc

SEQ ID NO: 674 - DNA, 20 bp, Homo sapiens
ttttcctcttctgggagtgg

SEQ ID NO: 675 - DNA, 20 bp, Homo sapiens
ctccaggttgggagccttag

SEQ ID NO: 676 - DNA, 20 bp, Homo sapiens
gggagctgagggcaggggtc

SEQ ID NO: 677 - DNA, 20 bp, Homo sapiens
agatgaaggtggacttcttc

SEQ ID NO: 678 - DNA, 20 bp, Homo sapiens
tttggccgggccatgggtgc

SEQ ID NO: 679 - DNA, 20 bp, Homo sapiens
ctcgcacctagcgggggcag

SEQ ID NO: 680 - DNA, 20 bp, Homo sapiens
cccgtgtaaggggctcgggg

SEQ ID NO: 681 - DNA, 20 bp, Homo sapiens
tgccggcccagtgggtcatc

SEQ ID NO: 682 - DNA, 20 bp, Homo sapiens
aaaggcagagaaggctgcgg

SEQ ID NO: 683 - DNA, 20 bp, Homo sapiens
aggagcccgtggggcagggc

SEQ ID NO: 684 - DNA, 20 bp, Homo sapiens
taaggggctcggggtgggcc

SEQ ID NO: 685 - DNA, 20 bp, Homo sapiens
acaccatcacgacgcgtggg

SEQ ID NO: 686 - DNA, 20 bp, Homo sapiens
ctggcaggagcccgtggggc

SEQ ID NO: 687 - DNA, 20 bp, Homo sapiens
ccggccttggggtgccctga

SEQ ID NO: 688 - DNA, 20 bp, Homo sapiens
ctgtgttagaccctcttggc

SEQ ID NO: 689 - DNA, 20 bp, Homo sapiens
gtgatgggcacgtcgggccg

SEQ ID NO: 690 - DNA, 20 bp, Homo sapiens
gcccctgggctctgcactgg

SEQ ID NO: 691 - DNA, 20 bp, Homo sapiens
ctgggtgagctggtgaaaca

SEQ ID NO: 692 - DNA, 20 bp, Homo sapiens
ggctgctccttcctccagga

SEQ ID NO: 693 - DNA, 20 bp, Homo sapiens
acagcctccaccaggtgcgg

SEQ ID NO: 694 - DNA, 20 bp, Homo sapiens
tgcccgagtccaggcaatcc

SEQ ID NO: 695 - DNA, 20 bp, Homo sapiens
aggtggaaaggcagggggcg

SEQ ID NO: 696 - DNA, 20 bp, Homo sapiens
cgacagattcattgtgaagc

SEQ ID NO: 697 - DNA, 20 bp, Homo sapiens
gcggggtggtggcaccccta

SEQ ID NO: 698 - DNA, 20 bp, Homo sapiens
ggcaatcctgggagacgtac

SEQ ID NO: 699 - DNA, 20 bp, Homo sapiens
gccgctcgccttggaggtca

SEQ ID NO: 700 - DNA, 20 bp, Homo sapiens
tcactgccagcaggatgccc

SEQ ID NO: 701 - DNA, 20 bp, Homo sapiens
cctgaaggactgatgtgggt

SEQ ID NO: 702 - DNA, 20 bp, Homo sapiens
gtgcgaggctcctgcctgat

SEQ ID NO: 703 - DNA, 20 bp, Homo sapiens
gcacctggtggaggctgtga

SEQ ID NO: 704 - DNA, 20 bp, Homo sapiens
tcacagcctccaccaggtgc

SEQ ID NO: 705 - DNA, 20 bp, Homo sapiens
gccgctctgggtggaagaat

SEQ ID NO: 706 - DNA, 20 bp, Homo sapiens
gactagagggagctgagggc

SEQ ID NO: 707 - DNA, 20 bp, Homo sapiens
tcagctccctctagtcccgc

SEQ ID NO: 708 - DNA, 20 bp, Homo sapiens
ggagcctccactcccagaag

SEQ ID NO: 709 - DNA, 20 bp, Homo sapiens
agaccctcttggcgggaccc

SEQ ID NO: 710 - DNA, 20 bp, Homo sapiens
ccaccttcatctgcagttcc

SEQ ID NO: 711 - DNA, 20 bp, Homo sapiens
gggagtggaggctccaggtt

SEQ ID NO: 712 - DNA, 20 bp, Homo sapiens
cagtgaactggtttctggag

SEQ ID NO: 713 - DNA, 20 bp, Homo sapiens
tcacctgtgatgggcacgtc

SEQ ID NO: 714 - DNA, 20 bp, Homo sapiens
tgccagcaggatgccccggc

SEQ ID NO: 715 - DNA, 20 bp, Homo sapiens
accctcttggcgggaccctg

SEQ ID NO: 716 - DNA, 20 bp, Homo sapiens
tgggggcagcttggccgctc

SEQ ID NO: 717 - DNA, 20 bp, Homo sapiens
aggaggaggccctggtgagc

SEQ ID NO: 718 - DNA, 20 bp, Homo sapiens
ctggaggtgggagccatgca

SEQ ID NO: 719 - DNA, 20 bp, Homo sapiens
tctggaggtgggagccatgc

SEQ ID NO: 720 - DNA, 20 bp, Homo sapiens
cctggatgggaagaagctgg

SEQ ID NO: 721 - DNA, 20 bp, Homo sapiens
ccagcccctgggctctgcac

SEQ ID NO: 722 - DNA, 20 bp, Homo sapiens
ggagtggaagcgcttcatcg

SEQ ID NO: 723 - DNA, 20 bp, Homo sapiens
tgtagcccgtgtaaggggct

SEQ ID NO: 724 - DNA, 20 bp, Homo sapiens
ggagtgaggagggccgggga

SEQ ID NO: 725 - DNA, 20 bp, Homo sapiens
gaggtcacggtatgtgtcgt

SEQ ID NO: 726 - DNA, 20 bp, Homo sapiens
ctagagggagctgagggcag

SEQ ID NO: 727 - DNA, 20 bp, Homo sapiens
tggtgtgtttcccccgcacc

SEQ ID NO: 728 - DNA, 20 bp, Homo sapiens
ctgatgtgggtgggggcagt

SEQ ID NO: 729 - DNA, 20 bp, Homo sapiens
agggccggggagggcaggct

SEQ ID NO: 730 - DNA, 20 bp, Homo sapiens
tgagctatgagtggcccctg

SEQ ID NO: 731 - DNA, 20 bp, Homo sapiens
tcttacgcaggaagttgtcc

SEQ ID NO: 732 - DNA, 20 bp, Homo sapiens
gttccgacatctggctctcc

SEQ ID NO: 733 - DNA, 20 bp, Homo sapiens
agggggcgcgggtgggtagt

SEQ ID NO: 734 - DNA, 20 bp, Homo sapiens
cgctggcctgctccttggcc

SEQ ID NO: 735 - DNA, 20 bp, Homo sapiens
gaaaggcagggggcgcgggt

SEQ ID NO: 736 - DNA, 20 bp, Homo sapiens
tagcccgtgtaaggggctcg

SEQ ID NO: 737 - DNA, 20 bp, Homo sapiens
ctgagggcaggggtccggtg

SEQ ID NO: 738 - DNA, 20 bp, Homo sapiens
acacagcttagtatacacgc

SEQ ID NO: 739 - DNA, 20 bp, Homo sapiens
ccgtcagggcaccccaaggc

SEQ ID NO: 740 - DNA, 20 bp, Homo sapiens
ggcaggggtccggtgaggtc

SEQ ID NO: 741 - DNA, 20 bp, Homo sapiens
ggacttgtaggagaggatct

SEQ ID NO: 742 - DNA, 20 bp, Homo sapiens
tcccagccatgggaacaagg

SEQ ID NO: 743 - DNA, 20 bp, Homo sapiens
gacttctaattgctgagaag

SEQ ID NO: 744 - DNA, 20 bp, Homo sapiens
ggctcctgaaggactgatgt

SEQ ID NO: 745 - DNA, 20 bp, Homo sapiens
tggcaggagcccgtggggca

SEQ ID NO: 746 - DNA, 20 bp, Homo sapiens
agacaggtgagaggaagggc

SEQ ID NO: 747 - DNA, 20 bp, Homo sapiens
tcggaactttggggggttcg

SEQ ID NO: 748 - DNA, 20 bp, Homo sapiens
gcctggatgggaagaagctg

SEQ ID NO: 749 - DNA, 20 bp, Homo sapiens
tgaaggactgatgtgggtgg

SEQ ID NO: 750 - DNA, 20 bp, Homo sapiens
ctgggggcccaggcatcccc

SEQ ID NO: 751 - DNA, 20 bp, Homo sapiens
gagcccccagtgcagagccc

SEQ ID NO: 752 - DNA, 20 bp, Homo sapiens
ggcgcgggtgggtagtcggc

SEQ ID NO: 753 - DNA, 20 bp, Homo sapiens
ccgtgtaaggggctcggggt

SEQ ID NO: 754 - DNA, 20 bp, Homo sapiens
gtcgtgatggtgtgaacacc

SEQ ID NO: 755 - DNA, 20 bp, Homo sapiens
acgacgcgtgggtggcaagc

SEQ ID NO: 756 - DNA, 20 bp, Homo sapiens
gggggcagtggcagcagctt

SEQ ID NO: 757 - DNA, 20 bp, Homo sapiens
agcgtgtatactaagctgtg

SEQ ID NO: 758 - DNA, 20 bp, Homo sapiens
gctcctgcctgatggggcat

SEQ ID NO: 759 - DNA, 20 bp, Homo sapiens
gtctgtcagggcctctggga

SEQ ID NO: 760 - DNA, 20 bp, Homo sapiens
gtagcccgtgtaaggggctc

SEQ ID NO: 761 - DNA, 20 bp, Homo sapiens
agcccctgggctctgcactg

SEQ ID NO: 762 - DNA, 20 bp, Homo sapiens
gtgaactggtttctggagcg

SEQ ID NO: 763 - DNA, 20 bp, Homo sapiens
ctacgagtctgacgggatcg

SEQ ID NO: 764 - DNA, 20 bp, Homo sapiens
agtgaactggtttctggagc

SEQ ID NO: 765 - DNA, 20 bp, Homo sapiens
acgcgtgggtggcaagcggg

SEQ ID NO: 766 - DNA, 20 bp, Homo sapiens
cgcgggactagagggagctg

SEQ ID NO: 767 - DNA, 20 bp, Homo sapiens
ggcaggagtgaggagggccg

SEQ ID NO: 768 - DNA, 20 bp, Homo sapiens
aagtgagtggcttcttacgc

SEQ ID NO: 769 - DNA, 20 bp, Homo sapiens
ctgaaggactgatgtgggtg

SEQ ID NO: 770 - DNA, 20 bp, Homo sapiens
ttgccacccacgcgtcgtga

SEQ ID NO: 771 - DNA, 20 bp, Homo sapiens
agggcaggagtgaggagggc

SEQ ID NO: 772 - DNA, 20 bp, Homo sapiens
tcttcttctccagttcccgc

SEQ ID NO: 773 - DNA, 20 bp, Homo sapiens
aggagtgaggagggccgggg

SEQ ID NO: 774 - DNA, 20 bp, Homo sapiens
actcccagaagaggaaaagg

SEQ ID NO: 775 - DNA, 20 bp, Homo sapiens
tgaggagggccggggagggc

SEQ ID NO: 776 - DNA, 20 bp, Homo sapiens
acctggtggaggctgtgatg

SEQ ID NO: 777 - DNA, 20 bp, Homo sapiens
cagggccgaggcctcctcag

SEQ ID NO: 778 - DNA, 20 bp, Homo sapiens
tactctcgaggtggaaaggc

SEQ ID NO: 779 - DNA, 20 bp, Homo sapiens
ttggggctctggggggtgag

SEQ ID NO: 780 - DNA, 20 bp, Homo sapiens
gctcctggacccccagcagc

SEQ ID NO: 781 - DNA, 20 bp, Homo sapiens
ggggggtgagaggagagcat

SEQ ID NO: 782 - DNA, 20 bp, Homo sapiens
cggcccagtgggtcatcagg

SEQ ID NO: 783 - DNA, 20 bp, Homo sapiens
aggaagggcaggagtgagga

SEQ ID NO: 784 - DNA, 20 bp, Homo sapiens
gagggccggggagggcaggc

SEQ ID NO: 785 - DNA, 20 bp, Homo sapiens
tgctgggggtccaggagctg

SEQ ID NO: 786 - DNA, 20 bp, Homo sapiens
gctgggggtccaggagctgt

SEQ ID NO: 787 - DNA, 20 bp, Homo sapiens
tgagaggaagggcaggagtg

SEQ ID NO: 788 - DNA, 20 bp, Homo sapiens
tgggagtggaggctccaggt

SEQ ID NO: 789 - DNA, 20 bp, Homo sapiens
gaggaagggcaggagtgagg

SEQ ID NO: 790 - DNA, 20 bp, Mus musculus
gctggctgtgaactggtttc

SEQ ID NO: 791 - DNA, 20 bp, Mus musculus
ctagttcccgaaggatgtgc

SEQ ID NO: 792 - DNA, 20 bp, Mus musculus
attggagaccaccactccgt

SEQ ID NO: 793 - DNA, 20 bp, Mus musculus
ttccctcctctgccagccat

SEQ ID NO: 794 - DNA, 20 bp, Mus musculus
cgaaggaagttgtccaggct

SEQ ID NO: 795 - DNA, 20 bp, Mus musculus
atacctgtgataggcacatc

SEQ ID NO: 796 - DNA, 20 bp, Mus musculus
gacttccttgttcccatggc

SEQ ID NO: 797 - DNA, 20 bp, Mus musculus
ggccttcgaatccgacggag

SEQ ID NO: 798 - DNA, 20 bp, Homo sapiens
ccttatgaaaaagtcaaaac

SEQ ID NO: 799 - DNA, 20 bp, Homo sapiens
aaaatatcaagtatatatgg

SEQ ID NO: 800 - DNA, 20 bp, Homo sapiens
tctagcatcggcatgccaaa

SEQ ID NO: 801 - DNA, 20 bp, Homo sapiens
ttggaagctcatggacaaag

SEQ ID NO: 802 - DNA, 20 bp, Homo sapiens
gatttcctcctcgaccacca

SEQ ID NO: 803 - DNA, 20 bp, Homo sapiens
cttcatctcttggatcaaag

SEQ ID NO: 804 - DNA, 20 bp, Homo sapiens
aatgtatgaagaacagtcac

SEQ ID NO: 805 - DNA, 20 bp, Homo sapiens
taaacttacctgaaacagcc

SEQ ID NO: 806 - DNA, 20 bp, Homo sapiens
aagaatatgatgttcctccc

SEQ ID NO: 807 - DNA, 20 bp, Homo sapiens
agcaagctgccgcagatcgc

SEQ ID NO: 808 - DNA, 20 bp, Homo sapiens
agtactcattctcactgagt

SEQ ID NO: 809 - DNA, 20 bp, Mus musculus
tctttgttgcaggagtctga

SEQ ID NO: 810 - DNA, 20 bp, Mus musculus
caggggcttgttatgaggta

SEQ ID NO: 811 - DNA, 20 bp, Mus musculus
ctgattgatggtagcaggga

SEQ ID NO: 812 - DNA, 20 bp, Mus musculus
ccttatcttcagtcacatgc

SEQ ID NO: 813 - DNA, 20 bp, Mus musculus
tcacatgctggcagaaatca

SEQ ID NO: 814 - DNA, 20 bp, Mus musculus
ttctgtcgctgtgagataaa

SEQ ID NO: 815 - DNA, 20 bp, Mus musculus
acaaggcagtacctgccacg

SEQ ID NO: 816 - DNA, 20 bp, Mus musculus
tgtgactcacccgggataca

SEQ ID NO: 817 - DNA, 20 bp, Mus musculus
gaggtccatcagatcagctc

SEQ ID NO: 818 - DNA, 20 bp, Mus musculus
atctccctggaactggccat

SEQ ID NO: 819 - DNA, 20 bp, Mus musculus
tgcaaaaattgcaaaactca

SEQ ID NO: 820 - DNA, 20 bp, Mus musculus
tgcacagaactattgtacca

SEQ ID NO: 821 - DNA, 20 bp, Mus musculus
cagattagtgcttaccttcc

SEQ ID NO: 822 - DNA, 20 bp, Mus musculus
attccgtaaaatagagcccc

SEQ ID NO: 823 - DNA, 20 bp, Mus musculus
ctgcactcggctgggacaat

SEQ ID NO: 824 - DNA, 20 bp, Homo sapiens
agtccatatggaacccacgg

SEQ ID NO: 825 - DNA, 20 bp, Homo sapiens
agtctgagtgcaaattgggc

SEQ ID NO: 826 - DNA, 20 bp, Homo sapiens
tacgaattgcaccggaccag

SEQ ID NO: 827 - DNA, 20 bp, Homo sapiens
ttagaggcttgaggaaaccg

SEQ ID NO: 828 - DNA, 20 bp, Homo sapiens
ttagaacctatgaagctctg

SEQ ID NO: 829 - DNA, 20 bp, Homo sapiens
cctgaataaactccaccgca

SEQ ID NO: 830 - DNA, 20 bp, Homo sapiens
aattcgaaagcccatcagtt

SEQ ID NO: 831 - DNA, 20 bp, Homo sapiens
tggccacaacccaaactgat

SEQ ID NO: 832 - DNA, 20 bp, Homo sapiens
cagcatactctgaggtacga

SEQ ID NO: 833 - DNA, 20 bp, Homo sapiens
ttacctctagcactgctgag

SEQ ID NO: 834 - DNA, 20 bp, Homo sapiens
tatgcagtccattattgaca

SEQ ID NO: 835 - DNA, 20 bp, Homo sapiens
gtaacacagcttattccgcg

SEQ ID NO: 836 - DNA, 20 bp, Homo sapiens
actttccctagcaatgcagg

SEQ ID NO: 837 - DNA, 20 bp, Mus musculus
caaatgggcaagccttacgg

SEQ ID NO: 838 - DNA, 20 bp, Mus musculus
ctcaatgtccgtattgatag

SEQ ID NO: 839 - DNA, 20 bp, Mus musculus
agtctgagtgcaaattgggc

SEQ ID NO: 840 - DNA, 20 bp, Mus musculus
ccagatagtgcaaattgcta

SEQ ID NO: 841 - DNA, 20 bp, Mus musculus
tgatagtggtctggtcaaat

SEQ ID NO: 842 - DNA, 20 bp, Mus musculus
aattcgaaagcccatcagtt

SEQ ID NO: 843 - DNA, 20 bp, Mus musculus
gcccattactttgtgtagtg

SEQ ID NO: 844 - DNA, 20 bp, Mus musculus
tggccacagcccaaactgat

SEQ ID NO: 845 - DNA, 20 bp, Homo sapiens
cgtccgcgccatgttccagg

SEQ ID NO: 846 - DNA, 20 bp, Homo sapiens
tggtttcaggagccctgtaa

SEQ ID NO: 847 - DNA, 20 bp, Homo sapiens
acccggatacagcagcagct

SEQ ID NO: 848 - DNA, 20 bp, Homo sapiens
ttccagggctccgagccgcg

SEQ ID NO: 849 - DNA, 20 bp, Homo sapiens
ctgaaggctaccaactacaa

SEQ ID NO: 850 - DNA, 20 bp, Homo sapiens
gggtatttcctcgaaagtct

SEQ ID NO: 851 - DNA, 20 bp, Homo sapiens
gagccgcaggaggtgccgcg

SEQ ID NO: 852 - DNA, 20 bp, Homo sapiens
ctgagtcaggactcccacgc

SEQ ID NO: 853 - DNA, 20 bp, Homo sapiens
cacttacgagtccccgtcct

SEQ ID NO: 854 - DNA, 20 bp, Homo sapiens
ctcaaattccttttggtttc

SEQ ID NO: 855 - DNA, 20 bp, Homo sapiens
ggttggtgatcacagccaag

SEQ ID NO: 856 - DNA, 20 bp, Homo sapiens
gcaggttgttctggaagttg

SEQ ID NO: 857 - DNA, 20 bp, Mus musculus
cctcgaaagtctcggagctc

SEQ ID NO: 858 - DNA, 20 bp, Mus musculus
ctgcgtcaagactgctacac

SEQ ID NO: 859 - DNA, 20 bp, Mus musculus
tgctcacaggcaagatgtag

SEQ ID NO: 860 - DNA, 20 bp, Mus musculus
ccggacagccctccaccttg

SEQ ID NO: 861 - DNA, 20 bp, Mus musculus
agacctaccattgtagttgg

SEQ ID NO: 862 - DNA, 20 bp, Mus musculus
ccaagtgctccacgatggcc

SEQ ID NO: 863 - DNA, 20 bp, Mus musculus
agcctctatccacggctacc

SEQ ID NO: 864 - DNA, 20 bp, Mus musculus
gccccaggtaagctggtagg

SEQ ID NO: 865 - DNA, 20 bp, Mus musculus
gcaagcagcgcacctgctgc

SEQ ID NO: 866 - DNA, 20 bp, Mus musculus
tcaagactgctacactggcc

SEQ ID NO: 867 - DNA, 20 bp, Mus musculus
gcaggttgttctggaagttg

SEQ ID NO: 868 - DNA, 20 bp, Mus musculus
gggtgctgatgtcaacgctc

SEQ ID NO: 869 - DNA, 20 bp, Mus musculus
ccacgatggccaggtagccg

SEQ ID NO: 870 - DNA, 20 bp, Mus musculus
tggtcagcggcttctcttcg

SEQ ID NO: 871 - DNA, 20 bp, Mus musculus
aatgtggggctgatgtcaac

SEQ ID NO: 872 - DNA, 20 bp, Mus musculus
atttcaacaagagcgaaacc

SEQ ID NO: 873 - DNA, 20 bp, Mus musculus
cacctgaccaatgacttcca

SEQ ID NO: 874 - DNA, 20 bp, Mus musculus
gccctggaagcagcagctca

SEQ ID NO: 875 - DNA, 20 bp, Mus musculus
gctcacaggcaagatgtaga

SEQ ID NO: 876 - protein, 207 aa, Homo sapiens
MQSGTHWRVLGLCLLSVGVWGQDGNEEMGGITQTPYKVSISGTTVILTCPQYPGSEILWQHNDKNIGGDEDDKNIGSDEDHLSLKEFSELEQSGYYVCYPRGSKPEDANFYLYLRARVCENCMEMDVMSVATIVIVDICITGGLLLLVYYWSKNRKAKAKPVTRGAGAGGRQRGQNKERPPPVPNPDYEPIRKGQRDLYSGLNQRRI

SEQ ID NO: 877 - protein, 220 aa, Homo sapiens
MLRLLLALNLFPSIQVTGNKILVKQSPMLVAYDNAVNLSCKYSYNLFSREFRASLHKGLDSAVEVCVVYGNYSQQLQVYSKTGFNCDGKLGNESVTFYLQNLYVNQTDIYFCKIEVMYPPPYLDNEKSNGTIIHVKGKHLCPSPLFPGPSKPFWVLVVVGGVLACYSLLVTVAFIIFWVRSKRSRLLHSDYMNMTPRRPGPTRKHYQPYAPPRDFAAYRS

SEQ ID NO: 878 - protein, 351 aa, Homo sapiens
MSFPCKFVASFLLIFNVSSKGAVSKEITNALETWGALGQDINLDIPSFQMSDDIDDIKWEKTSDKKKIAQFRKEKETFKEKDTYKLFKNGTLKIKHLKTDDQDIYKVSIYDTKGKNVLEKIFDLKIQERVSKPKISWTCINTTLTCEVMNGTDPELNLYQDGKHLKLSQRVITHKWTTSLSAKFKCTAGNKVSKESSVEPVSCPEKGLDIYLIIGICGGGSLLMVFVALLVFYITKRKKQRSRRNDEELETRAHRVATEERGRKPHQIPASTPQNPATSQHPPPPPGHRSQAPSHRPPPPGHRVQHQPQKRPPAPSGTQVHQQKGPPLPRPRVQPKPPHGAAENSLSPSSN

SEQ ID NO: 879 - protein, 153 aa, Homo sapiens
MYRMQLLSCIALSLALVTNSAPTSSSTKKTQLQLEHLLLDLQMILNGINNYKNPKLTRMLTFKFYMPKKATELKHLQCLEEELKPLEEVLNLAQSKNFHLRPRDLISNINVIVLELKGSETTFMCEYADETATIVEFLNRWITFCQSIISTLT

SEQ ID NO: 880 - protein, 255 aa, Homo sapiens
MGNSCYNIVATLLLVLNFERTRSLQDPCSNCPAGTFCDNNRNQICSPCPPNSFSSAGGQRTCDICRQCKGVFRTRKECSSTSNAECDCTPGFHCLGAGCSMCEQDCKQGQELTKKGCKDCCFGTFNDQKRGICRPWTNCSLDGKSVLVNGTKERDVVCGPSPADLSPGASSVTPPAPAREPGHSPQIISFFLALTSTALLFLLFFLTLRFSVVKRGRKKLLYIFKQPFMRPVQTTQEEDGCSCRFPEEEEGGCEL

SEQ ID NO: 881 - protein, 254 aa, Homo sapiens
MEYASDASLDPEAPWPPAPRARACRVLPWALVAGLLLLLLLAAACAVFLACPWAVSGARASPGSAASPRLREGPELSPDDPAGLLDLRQGMFAQLVAQNVLLIDGPLSWYSDPGLAGVSLTGGLSYKEDTKELVVAKAGVYYVFFQLELRRVVAGEGSGSVSLALHLQPLRSAAGAAALALTVDLPPASSEARNSAFGFQGRLLHLSAGQRLGVHLHTEARARHAWQLTQGATVLGLFRVTPEIPAGLPSPRSE

SEQ ID NO: 882 - protein, 136 aa, Homo sapiens [sequence omitted]

SEQ ID NO: 883 - protein, 177 aa, Homo sapiens
MFHVSFRYIFGLPPLILVLLPVASSDCDIEGKDGKQYESVLMVSIDQLLDSMKEIGSNCLNNEFNFFKRHICDANKEGMFLFRAARKLRQFLKMNSTGDFDLHLLKVSEGTTILLNCTGQVKGRKPAALGEAQPTKSLEENKSLKEQKKLNDLCFLKRLLQEIKTCWNKILMGTKEH

SEQ ID NO: 884 - protein, 162 aa, Homo sapiens
MRSSPGNMERIVICLMVIFLGTLVHKSSSQGQDRHMIRMRQLIDIVDQLKNYVNDLVPEFLPAPEDVETNCEWSAFSCFQKAQLKSANTGNNERIINVSIKKLKRKPPSTNAGRRQKHRLTCPSCDSYEKKPPKEFLERFKSLLQKMIHQHLSSRTHGSEDS

SEQ ID NO: 885 - protein, 142 aa, Homo sapiens
PNIQNPDPAVYQLRDSKSSDKSVCLFTDFDSQTNVSQSKDSDVYITDKTVLDMRSMDFKSNSAVAWSNKSDFACANAFNNSIIPEDTFFPSPESSCDVKLVEKSFETDTNLNFQNLSVIGFRILLLKVAGFNLLMTLRLWSS

SEQ ID NO: 886 - protein, 178 aa, Homo sapiens
DLKNVFPPEVAVFEPSEAEISHTQKATLVCLATGFYPDHVELSWWVNGKEVHSGVSTDPQPLKEQPALNDSRYCLSSRLRVSATFWQNPRNHFRCQVQFYGLSENDEWTQDRAKPVTQIVSAEAWGRADCGFTSESYQQGVLSATILYEILLGKATLYAVLVSALVLMAMVKRKDSRG

SEQ ID NO: 887 - protein, 9 aa, Homo sapiens
SLLMWITQC

SEQ ID NO: 888 - protein, 274 aa, Homo sapiens
METLLGLLILWLQLQWVSSKQEVTQIPAALSVPEGENLVLNCSFTDSAIYNLQWFRQDPGKGLTSLLLIQSSQREQTSGRLNASLDKSSGRSTLYIAASQPGDSATYLCAVRPTSGGSYIPTFGRGTSLIVHPYIQNPDPAVYQLRDSKSSDKSVCLFTDFDSQTNVSQSKDSDVYITDKCVLDMRSMDFKSNSAVAWSNKSDFACANAFNNSIIPEDTFFPSPESSCDVKLVEKSFETDTNLNFQNLSVIGFRILLLKVAGFNLLMTLRLWSS

SEQ ID NO: 889 - protein, 311 aa, Homo sapiens
MSIGLLCCAALSLLWAGPVNAGVTQTPKFQVLKTGQSMTLQCAQDMNHEYMSWYRQDPGMGLRLIHYSVGAGITDQGEVPNGYNVSRSTTEDFPLRLLSAAPSQTSVYFCASSYVGNTGELFFGEGSRLTVLEDLKNVFPPEVAVFEPSEAEISHTQKATLVCLATGFYPDHVELSWWVNGKEVHSGVCTDPQPLKEQPALNDSRYCLSSRLRVSATFWQNPRNHFRCQVQFYGLSENDEWTQDRAKPVTQIVSAEAWGRADCGFTSESYQQGVLSATILYEILLGKATLYAVLVSALVLMAMVKRKDSRG

SEQ ID NO: 890 - protein, 274 aa, Homo sapiens
METLLGLLILWLQLQWVSSKQEVTQIPAALSVPEGENLVLNCSFTDSAIYNLQWFRQDPGKGLTSLLLIQSSQREQTSGRLNASLDKSSGRSTLYIAASQPGDSATYLCAVRPLYGGSYIPTFGRGTSLIVHPYIQNPDPAVYQLRDSKSSDKSVCLFTDFDSQTNVSQSKDSDVYITDKCVLDMRSMDFKSNSAVAWSNKSDFACANAFNNSIIPEDTFFPSPESSCDVKLVEKSFETDTNLNFQNLSVIGFRILLLKVAGFNLLMTLRLWSS

SEQ ID NO: 891 - protein, 311 aa, Homo sapiens; identical to SEQ ID NO: 889

SEQ ID NO: 892 - protein, 9 aa, Homo sapiens
AAGIGILTV

SEQ ID NO: 893 - protein, 268 aa, Homo sapiens
MLLEHLLIILWMQLTWVSGQQLNQSPQSMFIQEGEDVSMNCTSSSIFNTWLWYKQEPGEGPVLLIALYKAGELTSNGRLTAQFGITRKDSFLNISASIPSDVGIYFCAGGTGNQFYFGTGTSLTVIPNIQNPDPAVYQLRDSKSSDKSVCLFTDFDSQTNVSQSKDSDVYITDKCVLDMRSMDFKSNSAVAWSNKSDFACANAFNNSIIPEDTFFPSPESSCDVKLVEKSFETDTNLNFQNLSVIGFRILLLKVAGFNLLMTLRLWSS

SEQ ID NO: 894 - protein, 311 aa, Homo sapiens
MGTRLFFYVALCLLWTGHMDAGITQSPRHKVTETGTPVTLRCHQTENHRYMYWYRQDPGHGLRLIHYSYGVKDTDKGEVSDGYSVSRSKTEDFLLTLESATSSQTSVYFCAISEVGVGQPQHFGDGTRLSILEDLKNVFPPEVAVFEPSEAEISHTQKATLVCLATGFYPDHVELSWWVNGKEVHSGVCTDPQPLKEQPALNDSRYCLSSRLRVSATFWQNPRNHFRCQVQFYGLSENDEWTQDRAKPVTQIVSAEAWGRADCGFTSESYQQGVLSATILYEILLGKATLYAVLVSALVLMAMVKRKDSRG

SEQ ID NO: 895 - protein, 272 aa, Homo sapiens
MKSLRVLLVILWLQLSWVWSQQKEVEQNSGPLSVPEGAIASLNCTYSDRGSQSFFWYRQYSGKSPELIMFIYSNGDKEDGRFTAQLNKASQYVSLLIRDSQPSDSATYLCAVNFGGGKLIFGQGTELSVKPNIQNPDPAVYQLRDSKSSDKSVCLFTDFDSQTNVSQSKDSDVYITDKCVLDMRSMDFKSNSAVAWSNKSDFACANAFNNSIIPEDTFFPSPESSCDVKLVEKSFETDTNLNFQNLSVIGFRILLLKVAGFNLLMTLRLWSS

SEQ ID NO: 896 - protein, 310 aa, Homo sapiens
MRIRLLCCVAFSLLWAGPVIAGITQAPTSQILAAGRRMTLRCTQDMRHNAMYWYRQDLGLGLRLIHYSNTAGTTGKGEVPDGYSVSRANTDDFPLTLASAVPSQTSVYFCASSLSFGTEAFFGQGTRLTVVEDLKNVFPPEVAVFEPSEAEISHTQKATLVCLATGFYPDHVELSWWVNGKEVHSGVCTDPQPLKEQPALNDSRYCLSSRLRVSATFWQNPRNHFRCQVQFYGLSENDEWTQDRAKPVTQIVSAEAWGRADCGFTSESYQQGVLSATILYEILLGKATLYAVLVSALVLMAMVKRKDSRG

SEQ ID NO: 897 - protein, 9 aa, Homo sapiens
RMFPNAPYL

SEQ ID NO: 898 - protein, 270 aa, Homo sapiens
MTSIRAVFIFLWLQLDLVNGENVEQHPSTLSVQEGDSAVIKCTYSDSASNYFPWYKQELGKRPQLIIDIRSNVGEKKDQRIAVTLNKTAKHFSLHITETQPEDSAVYFCAATEDLTLIWGAGTKLIIKPDIQNPDPAVYQLRDSKSSDKSVCLFTDFDSQTNVSQSKDSDVYITDKCVLDMRSMDFKSNSAVAWSNKSDFACANAFNNSIIPEDTFFPSPESSCDVKLVEKSFETDTNLNFQNLSVIGFRILLLKVAGFNLLMTLRLWSS

SEQ ID NO: 899 - protein, 310 aa, Homo sapiens
MSNQVLCCVVLCFLGANTVDGGITQSPKYLFRKEGQNVTLSCEQNLNHDAMYWYRQDPGQGLRLIYYSQIVNDFQKGDIAEGYSVSREKKESFPLTVTSAQKNPTAFYLCASSPGALYEQYFGPGTRLTVTEDLKNVFPPEVAVFEPSEAEISHTQKATLVCLATGFYPDHVELSWWVNGKEVHSGVCTDPQPLKEQPALNDSRYCLSSRLRVSATFWQNPRNHFRCQVQFYGLSENDEWTQDRAKPVTQIVSAEAWGRADCGFTSESYQQGVLSATILYEILLGKATLYAVLVSALVLMAMVKRKDSRG

SEQ ID NO: 900 - protein, 22 aa, Porcine teschovirus
GSGATNFSLLKQAGDVEENPGP

SEQ ID NO: 901 - protein, 607 aa, Homo sapiens
MSIGLLCCAALSLLWAGPVNAGVTQTPKFQVLKTGQSMTLQCAQDMNHEYMSWYRQDPGMGLRLIHYSVGAGITDQGEVPNGYNVSRSTTEDFPLRLLSAAPSQTSVYFCASSYVGNTGELFFGEGSRLTVLEDLKNVFPPEVAVFEPSEAEISHTQKATLVCLATGFYPDHVELSWWVNGKEVHSGVCTDPQPLKEQPALNDSRYCLSSRLRVSATFWQNPRNHFRCQVQFYGLSENDEWTQDRAKPVTQIVSAEAWGRADCGFTSESYQQGVLSATILYEILLGKATLYAVLVSALVLMAMVKRKDSRGGSGATNFSLLKQAGDVEENPGPMETLLGLLILWLQLQWVSSKQEVTQIPAALSVPEGENLVLNCSFTDSAIYNLQWFRQDPGKGLTSLLLIQSSQREQTSGRLNASLDKSSGRSTLYIAASQPGDSATYLCAVRPTSGGSYIPTFGRGTSLIVHPYIQNPDPAVYQLRDSKSSDKSVCLFTDFDSQTNVSQSKDSDVYITDKCVLDMRSMDFKSNSAVAWSNKSDFACANAFNNSIIPEDTFFPSPESSCDVKLVEKSFETDTNLNFQNLSVIGFRILLLKVAGFNLLMTLRLWSS

SEQ ID NO: 902 - protein, 607 aa, Homo sapiens
MSIGLLCCAALSLLWAGPVNAGVTQTPKFQVLKTGQSMTLQCAQDMNHEYMSWYRQDPGMGLRLIHYSVGAGITDQGEVPNGYNVSRSTTEDFPLRLLSAAPSQTSVYFCASSYVGNTGELFFGEGSRLTVLEDLKNVFPPEVAVFEPSEAEISHTQKATLVCLATGFYPDHVELSWWVNGKEVHSGVCTDPQPLKEQPALNDSRYCLSSRLRVSATFWQNPRNHFRCQVQFYGLSENDEWTQDRAKPVTQIVSAEAWGRADCGFTSESYQQGVLSATILYEILLGKATLYAVLVSALVLMAMVKRKDSRGGSGATNFSLLKQAGDVEENPGPMETLLGLLILWLQLQWVSSKQEVTQIPAALSVPEGENLVLNCSFTDSAIYNLQWFRQDPGKGLTSLLLIQSSQREQTSGRLNASLDKSSGRSTLYIAASQPGDSATYLCAVRPLYGGSYIPTFGRGTSLIVHPYIQNPDPAVYQLRDSKSSDKSVCLFTDFDSQTNVSQSKDSDVYITDKCVLDMRSMDFKSNSAVAWSNKSDFACANAFNNSIIPEDTFFPSPESSCDVKLVEKSFETDTNLNFQNLSVIGFRILLLKVAGFNLLMTLRLWSS

SEQ ID NO: 903 - protein, 601 aa, Homo sapiens
MGTRLFFYVALCLLWTGHMDAGITQSPRHKVTETGTPVTLRCHQTENHRYMYWYRQDPGHGLRLIHYSYGVKDTDKGEVSDGYSVSRSKTEDFLLTLESATSSQTSVYFCAISEVGVGQPQHFGDGTRLSILEDLKNVFPPEVAVFEPSEAEISHTQKATLVCLATGFYPDHVELSWWVNGKEVHSGVCTDPQPLKEQPALNDSRYCLSSRLRVSATFWQNPRNHFRCQVQFYGLSENDEWTQDRAKPVTQIVSAEAWGRADCGFTSESYQQGVLSATILYEILLGKATLYAVLVSALVLMAMVKRKDSRGGSGATNFSLLKQAGDVEENPGPMLLEHLLIILWMQLTWVSGQQLNQSPQSMFIQEGEDVSMNCTSSSIFNTWLWYKQEPGEGPVLLIALYKAGELTSNGRLTAQFGITRKDSFLNISASIPSDVGIYFCAGGTGNQFYFGTGTSLTVIPNIQNPDPAVYQLRDSKSSDKSVCLFTDFDSQTNVSQSKDSDVYITDKCVLDMRSMDFKSNSAVAWSNKSDFACANAFNNSIIPEDTFFPSPESSCDVKLVEKSFETDTNLNFQNLSVIGFRILLLKVAGFNLLMTLRLWSS

SEQ ID NO: 904 - protein, 604 aa, Homo sapiens
MRIRLLCCVAFSLLWAGPVIAGITQAPTSQILAAGRRMTLRCTQDMRHNAMYWYRQDLGLGLRLIHYSNTAGTTGKGEVPDGYSVSRANTDDFPLTLASAVPSQTSVYFCASSLSFGTEAFFGQGTRLTVVEDLKNVFPPEVAVFEPSEAEISHTQKATLVCLATGFYPDHVELSWWVNGKEVHSGVCTDPQPLKEQPALNDSRYCLSSRLRVSATFWQNPRNHFRCQVQFYGLSENDEWTQDRAKPVTQIVSAEAWGRADCGFTSESYQQGVLSATILYEILLGKATLYAVLVSALVLMAMVKRKDSRGGSGATNFSLLKQAGDVEENPGPMKSLRVLLVILWLQLSWVWSQQKEVEQNSGPLSVPEGAIASLNCTYSDRGSQSFFWYRQYSGKSPELIMFIYSNGDKEDGRFTAQLNKASQYVSLLIRDSQPSDSATYLCAVNFGGGKLIFGQGTELSVKPNIQNPDPAVYQLRDSKSSDKSVCLFTDFDSQTNVSQSKDSDVYITDKCVLDMRSMDFKSNSAVAWSNKSDFACANAFNNSIIPEDTFFPSPESSCDVKLVEKSFETDTNLNFQNLSVIGFRILLLKVAGFNLLMTLRLWSS

SEQ ID NO: 905 - protein, 602 aa, Homo sapiens
MSNQVLCCVVLCFLGANTVDGGITQSPKYLFRKEGQNVTLSCEQNLNHDAMYWYRQDPGQGLRLIYYSQIVNDFQKGDIAEGYSVSREKKESFPLTVTSAQKNPTAFYLCASSPGALYEQYFGPGTRLTVTEDLKNVFPPEVAVFEPSEAEISHTQKATLVCLATGFYPDHVELSWWVNGKEVHSGVCTDPQPLKEQPALNDSRYCLSSRLRVSATFWQNPRNHFRCQVQFYGLSENDEWTQDRAKPVTQIVSAEAWGRADCGFTSESYQQGVLSATILYEILLGKATLYAVLVSALVLMAMVKRKDSRGGSGATNFSLLKQAGDVEENPGPMTSIRAVFIFLWLQLDLVNGENVEQHPSTLSVQEGDSAVIKCTYSDSASNYFPWYKQELGKRPQLIIDIRSNVGEKKDQRIAVTLNKTAKHFSLHITETQPEDSAVYFCAATEDLTLIWGAGTKLIIKPDIQNPDPAVYQLRDSKSSDKSVCLFTDFDSQTNVSQSKDSDVYITDKCVLDMRSMDFKSNSAVAWSNKSDFACANAFNNSIIPEDTFFPSPESSCDVKLVEKSFETDTNLNFQNLSVIGFRILLLKVAGFNLLMTLRLWSS

SEQ ID NO: 906 - protein, 444 aa, Homo sapiens
MLLLVTSLLLCELPHPAFLLIPDILLTQSPVILSVSPGERVSFSCRASQSIGTNIHWYQQRTNGSPRLLIKYASESISGIPSRFSGSGSGTDFTLSINSVESEDIADYYCQQNNNWPTTFGAGTKLELKGGGGSGGGGSGGGGSQVQLKQSGPGLVQPSQSLSITCTVSGFSLTNYGVHWVRQSPGKGLEWLGVIWSGGNTDYNTPFTSRLSINKDNSKSQVFFKMNSLQSNDTAIYYCARALTYYDYEFAYWGQGTLVTVSATTTPAPRPPTPAPTIASQPLSLRPEACRPAAGGAVHTRGLDFACDIYIWAPLAGTCGVLLLSLVITLYCRVKFSRSADAPAYQQGQNQLYNELNLGRREEYDVLDKRRGRDPEMGGKPRRKNPQEGLYNELQKDKMAEAYSEIGMKGERRRGKGHDGLYQGLSTATKDTYDALHMQALPPR

SEQ ID NO: 907 - DNA, 1328 bp, Homo sapiens
atgctcctcctggttactagcttgcttttgtgcgaactgccgcatcctgccttccttctcatcccagatatacttctgacacaatctccggtaatactttccgtctcaccgggggagcgagtgtcattttcatgccgggcgagtcaatccatcgggacgaatattcactggtatcagcaaaggactaacggctcaccacgccttctcatcaagtatgccagtgagtccataagtggcattccctctagattctcaggatcaggcagtggcacggacttcacattgtcaattaatagcgtagaaagtgaggacatagcagattattattgccaacaaaacaataactggcctaccacattcggtgcaggcaccaagcttgagttgaaggggggtggtggttctggaggcggtgggagcggtggtggtgggtcacaagtgcagcttaagcaaagcggaccaggtctggtccaacctagccagtcactgtcaatcacatgtacggtatccggctttagtctgacaaattatggcgtccactgggtaaggcaatcccctggaaagggcctcgagtggttgggggtgatttggagcggaggaaacaccgactataatacccctttcacctccagactgtccataaacaaggacaactctaaaagtcaggtattcttcaaaatgaacagtctgcaaagtaatgacacagcgatatattattgcgcgagagcccttacatactacgattacgagttcgcttattggggacaaggaacgttggtgacggtgtctgccacaaccactcctgctcccaggccaccaacaccggcgcctaccatagcgtcacagccgcttagtctcaggccggaagcgtgtcgccccgcagccggtggggcggtccacacacgcgggctggatttcgcatgcgatatatacatctgggcaccccttgccgggacctgcggtgttttgctcttgtctctcgtaatcacgctgtactgtcgggttaagttttcaagatctgcggatgccccggcataccaacaagggcagaatcagttgtacaacgaactgaacttgggcagacgcgaggagtatgatgtcttggacaagaggcgggggcgcgacccggaaatgggtggcaaaccacggcgcaagaacccacaagaggggctttacaacgaattgcagaaagacaagatggccgaggcatacagcgagattggcatgaaaggagagaggaggaggggaaaggggcatgatggcctttatcagggcctttctactgccaccaaggacacatacgacgcactgcacatgcaggcattgccacc

SEQ ID NO: 908 - protein, 446 aa, Homo sapiens
MLLLVTSLLLCELPHPAFLLIPDIQMTQTTSSLSASLGDRVTISCRASQDISKYLNWYQQKPDGTVKLLIYHTSRLHSGVPSRFSGSGSGTDYSLTISNLEQEDIATYFCQQGNTLPYTFGGGTKLEITGGGGSGGGGSGGGGSEVKLQESGPGLVAPSQSLSVTCTVSGVSLPDYGVSWIRQPPRKGLEWLGVIWGSETTYYNSALKSRLTIIKDNSKSQVFLKMNSLQTDDTAIYYCAKHYYYGGSYAMDYWGQGTSVTVSSTTTPAPRPPTPAPTIASQPLSLRPEACRPAAGGAVHTRGLDFACDIYIWAPLAGTCGVLLLSLVITLYCLRVKFSRSADAPAYQQGQNQLYNELNLGRREEYDVLDKRRGRDPEMGGKPRRKNPQEGLYNELQKDKMAEAYSEIGMKGERRRGKGHDGLYQGLSTATKDTYDALHMQALPPR

SEQ ID NO: 909 - DNA, 1338 bp, Homo sapiens
atgctccttcttgtgacgtcactcctgctttgtgagctgccgcacccggcctttctgctcatacccgacatacaaatgacacagacgacaagttccctttccgcctccttgggcgaccgagtgacaatcagttgccgagcttcccaggacatatctaaatatttgaattggtatcagcaaaagccagatggtacggttaaacttcttatctaccacacctccaggctccattctggggttccgagccgattctctggatctggctcagggaccgattattctttgactatttccaatttggagcaggaagacatcgcaacctatttctgccaacaaggaaatacgctgccatacaccttcggcgggggcaccaaactcgagattactgggggtggggggagtggaggagggggttccggtggaggtgggtcagaagtcaagctgcaagagagtgggcccgggttggttgctcctagccaatccttgagtgtaacatgcaccgttagcggagtttcacttcctgactacggtgttagctggataagacagcccccgaggaagggtctggaatggctgggggtcatttggggcagtgagacgacatattacaacagtgccttgaaatccaggcttacgatcataaaagacaatagtaaaagccaagtgttcctcaagatgaactctcttcagaccgacgacacagccatctactattgcgcaaaacattattattatggaggtagttacgctatggactattggggccaggggacttcagtgacggtgagtagtaccacgactccggcaccgagaccaccaacaccagccccaacaattgcctcacagcccttgagccttagacccgaggcctgtaggcccgccgcaggaggggcagttcatacgcgaggattggactttgcatgtgacatctatatctgggcgccacttgcgggaacttgcggtgtccttttgctctcattggtcattaccctctattgtttgagagtaaaattttcccgctccgctgatgcgcctgcataccagcaaggtcagaaccaactctacaatgagcttaacctcggtagaagagaggaatatgacgtcttggataagaggagaggccgagacccagaaatggggggaaagccgcgccgcaagaatccacaagaaggtctttacaatgaactgcagaaggacaaaatggccgaagcgtatagcgagataggaatgaaaggcgaacggagacggggcaaggggcatgacgggctttaccaaggacttagcacagcgacgaaggatacatacgacgcactgcatatgcaagcgctgccaccgcgc

SEQ ID NO: 910 - protein, 496 aa, Homo sapiens
MDFQVQIFSFLLISASVIMSRGATGGATTTTCAGGTGCAGATTTTCAGCTTCCTGCTAATCAGTGCCTCADIQMTQSPSSLSASVGDRVTITCRASQDVNTAVAWYQQKPGKAPKLLIYSASFLYSGVPSRFSGSRSGTDFTLTISSLQPEDFATYYCQQHYTTPPTFGQGTKVEIKRTGSTSGSGKPGSGEGSEVQLVESGGGLVQPGGSLRLSCAASGFNIKDTYIHWVRQAPGKGLEWVARIYPTNGYTRYADSVKGRFTISADTSKNTAYLQMNSLRAEDTAVYYCSRWGGDGFYAMDVWGQGTLVTVSSTTTPAPRPPTPAPTIASQPLSLRPEACRPAAGGAVHTRGLDFACDIYIWAPLAGTCGVLLLSLVITLYCLRVKFSRSADAPAYQQGQNQLYNELNLGRREEYDVLDKRRGRDPEMGGKPRRKNPQEGLYNELQKDKMAEAYSEIGMKGERRRGKGHDGLYQGLSTATKDTYDALHMQALPPR

SEQ ID NO: 911 - DNA, 1488 bp, Homo sapiens
atggactttcaggtgcagatcttctcattcctccttatcagtgcgagtgtaattatgtcaagaggtgctacaggcggtgctaccacgacgacatgcgcagggggtaccggttgtgcaggagcgaccacgactacctgcgcaggttgtaccacctgttgtactggatgtactgctgcgacatgtgcggggacgggttgttgcacttgtgcggacatacaaatgacgcaaagcccgtccagcctgtctgcatcagttggggatagagtgacgattacatgtagagcaagccaggatgttaacaccgccgtagcgtggtaccaacaaaaaccaggtaaagccccgaagctgctcatatactccgccagctttctgtattcaggcgttcccagtcggttcagcggcagcagatcagggacggattttacgctcactatctcttcccttcagcctgaagattttgctacctattattgtcagcagcattacacgactcccccaacttttggtcaggggactaaagttgaaatcaaacgaacgggctccacctcaggtagcggtaagccaggcagcggagaagggtctgaagtccagttggttgagagtggaggcggtcttgtgcaacccggtggcagcttgcgactgagctgtgcagcgtctggcttcaacataaaagatacttatattcattgggtaagacaggctcctggtaaagggctggaatgggtggcacgaatatatccgactaacggttataccagatacgccgattctgttaagggcaggttcacaataagcgccgacacaagtaagaatacggcgtatctgcagatgaattcacttcgagctgaagacacagcggtatactactgctccaggtggggtggggatggtttttatgcgatggacgtttggggtcaaggaacactggtaactgttagttctaccacgacacctgctcctaggccccccacaccggcacctacgatcgcttcccagccgcttagcctccgcccggaggcatgccggcccgctgcggggggagcggtacatactcgcgggttggacttcgcttgcgacatctacatttgggcaccactggcaggcacatgtggcgttctgttgcttagtctggttattacactgtattgcctgcgagttaaattctcccgcagcgctgatgcgcccgcctatcagcaaggtcaaaaccagctgtataatgagcttaatttgggacgccgagaagagtatgacgtccttgacaagaggcgcgggcgcgatccggagatgggtggtaaaccgcgccggaaaaacccccaggaaggcctttacaatgagctccaaaaagataaaatggcagaggcatactctgaaataggaatgaagggcgagagacgccggggtaagggacacgatggcctttatcaagggcttagtacagccacgaaggatacgtatgacgctctgcacatgcaggctcttcccccgaga

SEQ ID NO: 912 - DNA, 20 bp, Homo sapiens
gctgaccagtaactcccagg

SEQ ID NO: 913 - DNA, 20 bp, Homo sapiens
agatgatgtcaaccaaggag
